(19) United States
(12) Patent Application Publication
(10) Pub. No.: US 2005/0272043 A1
(43) Pub. Date: Dec. 8, 2005

(54) Methods for identifying risk of breast cancer and treatments thereof

(76) Inventors: Richard B. Roth, La Jolla, CA (US); Andreas Braun, San Diego, CA (US); Stefan M. Kammerer, San Diego, CA (US); Matthew Roberts Nelson, San Marcos, CA (US); Rikard Henry Reneland, San Diego, CA (US); Carolyn R. Hoyal-Wrightson, San Diego, CA (US)

Correspondence Address: BIOTECHNOLOGY LAW GROUP, c/o PORTFOLIO IP, P.O. BOX 52050, MINNEAPOLIS, MN, 55402, US

(21) Appl. No.: 10/857,780

(22) Filed: May 27, 2004

Related U.S. Application Data
(63) Continuation-in-part of application No. 10/723,681, filed on Nov. 25, 2003.
(60) Provisional application No. 60/490,234, filed on Jul. 24, 2003.
(60) Provisional application No. 60/525,239, filed on Nov. 25, 2003.

(51) Int. Cl. C12Q 1/68

(52) U.S. Cl. 435/6

(57) ABSTRACT

Provided herein are methods for identifying risk of breast cancer in a subject and/or a subject at risk of breast cancer, reagents and kits for carrying out the methods, methods for identifying candidate therapeutics for treating breast cancer, and therapeutic methods for treating breast cancer in a subject. These embodiments are based upon an analysis of polymorphic variations in nucleotide sequences within the human genome.

### RELATED PATENT APPLICATIONS

[0001] This patent application claims the benefit of provisional patent application No. 60/490,234 filed Jul. 24, 2003, having attorney docket number 524593004101. This patent application is a continuation in part of U.S. patent application Ser. No. 10/723,681 filed on Nov. 25, 2003, entitled “Methods for identifying risk of breast cancer and treatments thereof,” naming Richard B. Roth et al. as inventors, and having attorney docket no. 524592006900. U.S. patent application Ser. Nos. 10/723,670, 10/723,518, 10/722,939 and 10/723,683, having attorney docket numbers524592006700, 524592006800, 524592007100 and 524592007200, respectively, filed on Nov. 25, 2003, name Richard B. Roth et al. as inventors, and have the same title as U.S. patent application Ser. No. 10/723,681, are related. This patent application also claims the benefit of U.S. patent application No. 60/525,239 filed on Nov. 25, 2003, naming Matthew R. Nelson as an inventor, entitled “Disease risk prediction with associated single nucleotide polymorphisms,” and having attorney docket number 524593006400. Each of these patent applications is hereby incorporated herein by reference in its entirety, including all drawings, cited publications and documents

### FIELD OF THE INVENTION

[0002] The invention relates to genetic methods for identifying risk of breast cancer and treatments that specifically target the disease.

### BACKGROUND

[0003] Breast cancer is the third most common cancer, and the most common cancer in women, as well as a cause of disability, psychological trauma, and economic loss. Breast cancer is the second most common cause of cancer death in women in the United States, in particular for women between the ages of 15 and 54, and the leading cause of cancer-related death (Forbes, Seminars in Oncology, vol. 24 (1), Suppl 1, 1997: pp. S1-20-S1-35). Indirect effects of the disease also contribute to the mortality from breast cancer including consequences of advanced disease, such as metastases to the bone or brain. Complications arising from bone marrow suppression, radiation fibrosis and neutropenic sepsis, collateral effects from therapeutic interventions, such as surgery, radiation, chemotherapy, or bone marrow transplantation-also contribute to the morbidity and mortality from this disease.

[0004] While the pathogenesis of breast cancer is unclear, transformation of normal breast epithelium to a malignant phenotype may be the result of genetic factors, especially in women under thirty (Miki, et al., Science, 266: 66-71 (1994)). However, it is likely that other, non-genetic factors also have a significant effect on the etiology of the disease. Regardless of its origin, breast cancer morbidity increases significantly if it is not detected early in its progression. Thus, considerable efforts have focused on the elucidation of early cellular events surrounding transformation in breast tissue. Such efforts have led to the identification of several potential breast cancer markers. For example, alleles of the BRCA1 and BRCA2 genes have been linked to hereditary and early-onset breast cancer (Wooster, et al., Science, 265: 2088-2090 (1994)). However, BRCA1 is limited as a cancer marker because BRCA1 mutations fail to account for the majority of breast cancers (Ford, et al., British J. Cancer, 72: 805-812 (1995)). Similarly, the BRCA2 gene, which has been linked to forms of hereditary breast cancer, accounts for only a small portion of total breast cancer cases.

### SUMMARY

[0005] It has been discovered that certain polymorphic variations in human genomic DNA are associated with the occurrence of breast cancer. In particular, polymorphic variants in loci containing ICAM, MAPK10, KIAA0861, NUMA1/FLJ20625/LOC220074 (hereafter referred to as “NUMA1”), HT014/LOC148902/LYPLA2/GALE (hereafter refered to as “GALE”), DPF3 and LOC145197 regions in human genomic DNA have been associated with risk of breast cancer.

[0006] Thus, featured herein are methods for identifying a subject at risk of breast cancer and/or a risk of breast cancer in a subject, which comprises detecting the presence or absence of one or more polymorphic variations accociated with breast cancer in genomic regions described herein in a human nucleic acid sample. In an embodiment, two or more polymorphic variations are detected in two or more regions selected from the group consisting of ICAM, MAK10, KIAA0861, NUMA1, GALE, DPF3 and LOC145197. In certain embodiments, 3 or more, or 4, 5, 6, 7, 8, 9, 10, 11, 12, 13, 14, 15, 16, 17, 18, 19 or 20 or more polymorphic variants are detected. In specific embodiments, the group of polymorphic variants detected comprise or consist of polymorphic variants in ICAM, MAPK10, KIAA0861, NUMA1, GALE, DPF3 and/or LOC145197, such as position 44247 in SEQ ID NO: 1 (ICAM), position 36424 in SEQ ID NO: 2 (MAPK10), position 48563 in SEQ ID NO: 3 (KIAA0861), position 49002 in SEQ ID NO: 4 (NUMA1) and position 174 in SEQ ID NO: 5 (GALE), for example.

[0007] Also featured are nucleic acids that include one or more polymorphic variations associated with the occurrence of breast cancer, as well as polypeptides encoded by these nucleic acids. Further, provided is a method for identifying a subject at risk of breast cancer and then prescribing to the subject a breast cancer detection procedure, prevention procedure and/or a treatment procedure. In addition, provided are methods for identifying candidate therapeutic molecules for treating breast cancer and related disorders, as well as methods for treating breast cancer in a subject by diagnosing breast cancer in the subject and treating the subject with a suitable treatment, such as administering a therapeutic molecule.

[0008] Also provided are compositions comprising a breast cancer cell and/or ICAM, AAPK10, KIAA0861, NUMA1, GALE, DPF3 or LOC145197 nucleic acid with a RNAi, siRNA, antisense DNA or RNA, or ribozyme nucleic acid designed from a ICAM, MAPK10, KIAA0861, NUMA1, GALE, DPF3 or LOC145197 nucleotide sequence. In an embodiment, the nucleic acid is designed from a ICAM, MAPK10, KIAA0861, NUMA1, GALE, DPF3 or LOC145197 nucleotide sequence that includes one or more breast cancer associated polymorphic variations, and in some instances, specifically interacts with such a nucleotide sequence. Further, provided are arrays of nucleic acids bound to a solid surface, in which one or more nucleic acid molecules of the array have a ICAM, MAPK10, KIAA0861, NUMA1, GALE, DPF3 or LOC145197 nucleotide sequence, or a fragment or substantially identical nucleic acid thereof, or a complementary nucleic acid of the foregoing. Featured also are compositions comprising a breast cancer cell and/or a ICAM, MAPK10, KIAA0861, NUMA1, GALE, DPF3 or LOC145197 polypeptide, with an antibody that specifically binds to the polypeptide. In an embodiment, the antibody specifically binds to an epitope in the polypeptide that includes a non-synonymous amino acid modification associated with breast cancer (e.g., results in an amino acid substitution in the encoded polypeptide associated with breast cancer). In certain embodiments, the antibody specifically binds to an epitope that comprises a proline at amino acid position 352, an alanine at amino acid position 348, or a glycine at amino acid position 241 in an ICAM5 polypeptide.

### BRIEF DESCRIPTION OF THE FIGURES

[0009] FIGS. 1A-1G show proximal SNPs in ICAM, MAPK10, KIAA0861, NUMA1, GALE, DPF3 and LOC145197 regions of genomic DNA, respectively. The position of each SNP on the chromosome is shown on the x-axis and the y-axis provides the negative logarithm of the p-value comparing the estimated allele to that of the control group. Also shown in the figure are exons and introns of the genes in the approximate chromosomal positions.

[0010] FIGS. 2A-2D show results of an odds-ratio meta analysis for ICAM, MAPK10, KIkA0861 NUMA1 regions.

[0011] FIG. 3 shows effects of ICAM-directed siRNA on cancer cell proliferation.

### DETAILED DESCRIPTION

[0012] It has been discovered that polymorphic variations in the ICAM, MAPK10, KIAA0861, NUMA1, GALE, DPF3 and LOC145197 regions described herein are associated with an increased risk of breast cancer.

[0013] All ICAM proteins are type I transmembrane glycoproteins, contain 2-9 immunoglobulin-like C2-type domains, and bind to the leukocyte adhesion LFA-1 protein. The proteins are members of the intercellular adhesion molecule (ICAM) family. The gene ICAM1 (intercellular adhesion molecule-1) is also known as human rhinovirus receptor, BB2, CD54. and cell surface glycoprotein P3.58. ICAM1 has been mapped to chromosomal position 19p13.3-p13.2. ICAM1 (CD54) typically is expressed on endothelial cells and cells of the immune system. ICAM1 binds to integrins of type CD11a/CD 18, or CD11b/CD18. ICAM1 is also exploited by Rhinovirus as a receptor.

[0014] The gene ICAM4 (intercellular adhesion molecule 4) is also known as the Landsteiner-Wiener blood group or LW. ICAM4 has been mapped to 19p13.2-cen. The protein encoded by this gene is a member of the intercellular adhesion molecule (ICAM) family. A glutamine to arginine polymorphism in this protein is responsible for the Landsteiner-Wiener blood group system (GLN=WB(A); ARG=WB(B). This gene consists of 3 exons and alternative splicing generates 2 transcript variants.

[0015] The gene ICAM5 (intercellular adhesion molecule 5) is also known as telencephalin. ICAM5 has been mapped to 19p13.2. The protein encoded by the gene is expressed on the surface of telencephalic neurons and displays two types of adhesion activity, homophilic binding between neurons and heterophilic binding between neurons and leukocytes. It may be a critical component in neuron-microglial cell interactions in the course of normal development or as part of neurodegenerative diseases.

[0016] The gene MAPK10 also is known as JNK3, JNK3A, PRKM10, p493F12, FLJ12099, p54bSAPK MAP kinase, c-Jun kinase 3, JNK3 alpha protein kinase, c-Jun N-terminal kinase 3, stress activated protein kinase JNK3, stress activated protein kinase beta. MAPK10 has been mapped to chromosomal position 4q22.1-q23. The protein encoded by this gene is a member of the MAP kinase family. MAP kinases act as an integration point for multiple biochemical signals, and are involved in a wide variety of cellular processes such as proliferation, differentiation, transcription regulation and development. This protein is a neuronal-specific form of c-Jun N-terminal kinases (JNKs). Through its phosphorylation and nuclear localization, this kinase plays regulatory roles in the signaling pathways during neuronal apoptosis. Beta-arrestin 2, a receptor-regulated MAP kinase scaffold protein, is found to interact with, and stimulate the phosphorylation of this kinase by MAP kinase kinase 4 (MKK4). Cyclin-dependent kinase 5 can phosphorylate, and inhibit the activity of this kinase, which may be important in preventing neuronal apoptosis. Four alternatively spliced transcript variants encoding distinct isoforms have been reported.

[0017] The gene KIAA0861 is a Rho family guanine-nucleotide exchange factor. KIAA0861 has been mapped to chromosomal position 3q27.3. KIAA0861 is a Rho family nucleotide exchange factor homolog that modulates the activity of Rho family GTPases, which control numerous cell functions, including cell growth, adhesion, movement and shape. RhoC GTPase is overexpressed in invasive (inflammatory) breast cancers.

[0018] The gene FLJ20625 has been mapped to chromosomal position 11q13.3. The gene encoding LOC220074 also is known as Hypothetical 55.1 kDa protein F09G8.5 in chromosome III and has been mapped to chromosomal position 11q13.3.

[0019] The gene HT014 has been mapped to chromosomal position 1p36.11. The gene LYPLA2 (lysophospholipase II) also is known as APT-2, DJ886K2.4 and acyl-protein thioesterase and has been mapped to chromosomal position 1p36.12-p35.1. Lysophospholipases are enzymes that act on biological membranes to regulate the multifunctional lysophospholipids. There are alternatively spliced transcript variants described for this gene but the full length nature is not known yet.

[0020] The gene GALE (galactose-4-epimerase, UDP-) also is known as galactowaldenase UDP galactose4-epimerase and has been mapped to chromosomal position 1 p36-p35. This gene encodes UDP-galactose-4-epimerase which catalyzes 2 distinct but analogous reactions: the epimerization of UDP-glucose to UDP-galactose, and the epimerization of UDP-N-acetylglucosamine to UDP-N-acetylgalactosamine. The bifunctional nature of the enzyme has the important metabolic consequence that mutant cells (or individuals) are dependent not only on exogenous galactose, but also on exogenous N-acetylgalactosamine for necessary precursor for the synthesis of glycoproteins and glycolipids. The missense mutations in the GALE gene result in the epimerase-deficiency galactosemia.

[0021] The gene DPF3 (D4, zinc and double PHD fingers, family 3) also is known as CERD4, cer-d4, FLJ14079, and 2810403B03Rik. DPF3 is a Rho family guanine-nucleotide exchange factor. DPF3 has been mapped to chromosomal position 14q24.3-q31.1.

[0022] Breast Cancer and Sample Selection

[0023] Breast cancer is typically described as the uncontrolled growth of malignant breast tissue. Breast cancers arise most commonly in the lining of the milk ducts of the breast (ductal carcinoma), or in the lobules where breast milk is produced (lobular carcinoma). Other forms of breast cancer include Inflammatory Breast Cancer and Recurrent Breast Cancer. Inflammatory breast cancer is a rare, but very serious, aggressive type of breast cancer. The breast may look red and feel warm with ridges, welts, or hives on the breast; or the skin may look wrinkled. It is sometimes misdiagnosed as a simple infection. Recurrent disease means that the cancer has come back after it has been treated. It may come back in the breast, in the soft tissues of the chest (the chest wall), or in another part of the body.

[0024] As used herein, the term “breast cancer” refers to a condition characterized by anomalous rapid proliferation of abnormal cells in one or both breasts of a subject. The abnormal cells often are referred to as “neoplastic cells,” which are transformed cells that can form a solid tumor. The term “tumor” refers to an abnormal mass or population of cells (i.e. two or more cells) that result from excessive or abnormal cell division, whether malignant or benign, and pre-cancerous and cancerous cells. Malignant tumors are distinguished from benign growths or tumors in that, in addition to uncontrolled cellular proliferation, they can invade surrounding tissues and can metastasize. In breast cancer, neoplastic cells may be identified in one or both breasts only and not in another tissue or organ, in one or both breasts and one or more adjacent tissues or organs (e.g. lymph node), or in a breast and one or more non-adjacent tissues or organs to which the breast cancer cells have metastasized.

[0025] The term “invasion” as used herein refers to the spread of cancerous cells to adjacent surrounding tissues. The term “invasion” often is used synonymously with the term “metastasis,” which as used herein refers to a process in which cancer cells travel from one organ or tissue to another non-adjacent organ or tissue. Cancer cells in the breast(s) can spread to tissues and organs of a subject, and conversely, cancer cells from other organs or tissue can invade or metastasize to a breast. Cancerous cells from the breast(s) may invade or metastasize to any other organ or tissue of the body. Breast cancer cells often invade lymph node cells and/or metastasize to the liver, brain and/or bone and spread cancer in these tissues and organs. Breast cancers can spread to other organs and tissues and cause lung cancer, prostate cancer, colon cancer, ovarian cancer, cervical cancer, gastrointestinal cancer, pancreatic cancer, glioblastoma, bladder cancer, hepatoma, colorectal cancer, uterine cervical cancer, endometrial carcinoma, salivary gland carcinoma, kidney cancer, vulval cancer, thyroid cancer, hepatic carcinoma, skin cancer, melanoma, ovarian cancer, neuroblastoma, myeloma, various types of head and neck cancer, acute lymphoblastic leukemia, acute myeloid leukemia, Ewing sarcoma and peripheral neuroepithelioma, and other carcinomas, lymphomas, blastomas, sarcomas, and leukemias.

[0026] Breast cancers arise most commonly in the lining of the milk ducts of the breast (ductal carcinoma), or in the lobules where breast milk is produced (lobular carcinoma). Other forms of breast cancer include Inflammatory Breast Cancer and Recurrent Breast Cancer. Inflammatory Breast Cancer is a rare, but very serious, aggressive type of breast cancer. The breast may look red and feel warm with ridges, welts, or hives on the breast; or the skin may look wrinkled. It is sometimes misdiagnosed as a simple infection. Recurrent disease means that the cancer has come back after it has been treated. It may come back in the breast, in the soft tissues of the chest (the chest wall), or in another part of the body. As used herein, the term “breast cancer” may include both Inflammatory Breast Cancer and Recurrent Breast Cancer.

[0027] In an effort to detect breast cancer as early as possible, regular physical exams and screening mammograms often are prescribed and conducted. A diagnostic mammogram often is performed to evaluate a breast complaint or abnormality detected by physical exam or routine screening mammography. If an abnormality seen with diagnostic mammography is suspicious, additional breast imaging (with exams such as ultrasound) or a biopsy may be ordered. A biopsy followed by pathological (microscopic) analysis is a definitive way to determine whether a subject has breast cancer. Excised breast cancer samples often are subjected to the following analyses: diagnosis of the breast tumor and confirmation of its malignancy; maximum tumor thickness; assessment of completeness of excision of invasive and in situ components and microscopic measurements of the shortest extent of clearance; level of invasion; presence and extent of regression; presence and extent of ulceration; histological type and special variants; pre-existing lesion; mitotic rate; vascular invasion; neurotropism; cell type; tumor lymphocyte infiltration; and growth phase.

[0028] The stage of a breast cancer can be classified as a range of stages from Stage 0 to Stage IV based on its size and the extent to which it has spread. The following table summarizes the stages:

TABLE A

| | | | Metastasis |
|---|---|---|---|
| Stage | Tumor Size | Lymph Node Involvement | (Spread) |
| I | Less than 2 cm | No | No |
| II | Between 2-5 cm | No or in same side of breast | No |
| III | More than 5 cm | Yes, on same side of breast | No |
| IV | Not applicable | Not applicable | Yes |

[0029] Stage 0 cancer is a contained cancer that has not spread beyond the breast ductal system. Fifteen to twenty percent of breast cancers detected by clinical examinations or testing are in Stage 0 (the earliest form of breast cancer). Two types of Stage 0 cancer are lobular carcinoma in situ (LCIS) and ductal carcinoma in situ (DCIS). LCIS indicates high risk for breast cancer. Many physicians do not classify LCIS as a malignancy and often encounter LCIS by chance on breast biopsy while investigating another area of concern. While the microscopic features of LCIS are abnormal and are similar to malignancy, LCIS does not behave as a cancer (and therefore is not treated as a cancer). LCIS is merely a marker for a significantly increased risk of cancer anywhere in the breast. However, bilateral simple mastectomy may be occasionally performed if LCIS patients have a strong family history of breast cancer. In DCIS the cancer cells are confined to milk ducts in the breast and have not spread into the fatty breast tissue or to any other part of the body (such as the lymph nodes). DCIS may be detected on mammogram as tiny specks of calcium (known as microcalcifications) 80% of the time. Less commonly DCIS can present itself as a mass with calcifications (15% of the time); and even less likely as a mass without calcifications (<5% of the time). A breast biopsy is used to confirm DCIS. A standard DCIS treatment is breast-conserving therapy (BCT), which is lumpectomy followed by radiation treatment or mastectomy. To date, DCIS patients have chosen equally among lumpectomy and mastectomy as their treatment option, though specific cases may sometimes favor lumpectomy over mastectomy or vice versa.

[0030] In Stage I, the primary cancer is 2 cm or less in diameter and has not spread to the lymph nodes. In Stage IIA, the primary tumor is between 2 and 5 cm in diameter and has not spread to the lymph nodes. In Stage IIIB, the primary tumor is between 2 and 5 cm in diameter and has spread to the axillary (underarm) lymph nodes; or the primary tumor is over 5 cm and has not spread to the lymph nodes. In Stage 111A, the primary breast cancer of any kind that has spread to the axillary (underarm) lymph nodes and to axillary tissues. In Stage IIIB, the primary breast cancer is any size, has attached itself to the chest wall, and has spread to the pectoral (chest) lymph nodes. In Stage IV, the primary cancer has spread out of the breast to other parts of the body (such as bone, lung, liver, brain). The treatment of Stage IV breast cancer focuses on extending survival time and relieving symptoms.

[0031] Based in part upon selection criteria set forth above, individuals having breast cancer can be selected for genetic studies. Also, individuals having no history of cancer or breast cancer often are selected for genetic studies. Other selection criteria can include: a tissue or fluid sample is derived from an individual characterized as Caucasian; the sample was derived from an individual of German paternal and maternal descent; the database included relevant phenotype information for the individual; case samples were derived from individuals diagnosed with breast cancer; control samples were derived from individuals free of cancer and no family history of breast cancer; and sufficient genomic DNA was extracted from each blood sample for all allelotyping and genotyping reactions performed during the study. Phenotype information included pre- or post-menopausal, familial predisposition, country or origin of mother and father, diagnosis with breast cancer (date of primary diagnosis, age of individual as of primary diagnosis, grade or stage of development, occurrence of metastases, e.g., lymph node metastases, organ metastases), condition of body tissue (skin tissue, breast tissue, ovary tissue, peritoneum tissue and myometrium), method of treatment (surgery, chemotherapy, hormone therapy, radiation therapy).

[0032] Provided herein is a set of blood samples and a set of corresponding nucleic acid samples isolated from the blood samples, where the blood samples are donated from individuals diagnosed with breast cancer. The sample set often includes blood samples or nucleic acid samples from 100 or more, 150 or more, or 200 or more individuals having breast cancer, and sometimes from 250 or more, 300 or more, 400 or more, or 500 or more individuals. The individuals can have parents from any place of origin, and in an embodiment, the set of samples are extracted from individuals of German paternal and German maternal ancestry. The samples in each set may be selected based upon five or more criteria and/or phenotypes set forth above.

[0033] Polymorphic Variants Associated with Breast Cancer

[0034] A genetic analysis provided herein linked breast cancer with polymorphic variants in the ICAM, MAPK10, KIAA0861, NUMA1, GALE, DPF3 and LOC145197 regions of the human genome disclosed herein. As used herein, the term “polymorphic site” refers to a region in a nucleic acid at which two or more alternative nucleotide sequences are observed in a significant number of nucleic acid samples from a population of individuals. A polymorphic site may be a nucleotide sequence of two or more nucleotides, an inserted nucleotide or nucleotide sequence, a deleted nucleotide or nucleotide sequence, or a microsatellite, for example. A polymorphic site that is two or more nucleotides in length may be 3, 4, 5, 6, 7, 8, 9, 10, 11, 12, 13, 14, 15 or more, 20 or more, 30 or more, 50 or more, 75 or more, 100 or more, 500 or more, or about 1000 nucleotides in length, where all or some of the nucleotide sequences differ within the region. A polymorphic site is often one nucleotide in length, which is referred to herein as a “single nucleotide polymorphism” or a “SNP.”

[0035] Where there are two, three, or four alternative nucleotide sequences at a polymorphic site, each nucleotide sequence is referred to as a “polymorphic variant” or “nucleic acid variant.” Where two polymorphic variants exist, for example, the polymorphic variant represented in a minority of samples from a population is sometimes referred to as a “minor allele” and the polymorphic variant that is more prevalently represented is sometimes referred to as a “major allele.” Many organisms possess a copy of each chromosome (e.g., humans), and those individuals who possess two major alleles or two minor alleles are often referred to as being “homozygous” with respect to the polymorphism, and those individuals who possess one major allele and one minor allele are normally referred to as being “heterozygous” with respect to the polymorphism. Individuals who are homozygous with respect to one allele are sometimes predisposed to a different phenotype as compared to individuals who are heterozygous or homozygous with respect to another allele.

[0036] Furthermore, a genotype or polymorphic variant may be expressed in terms of a “haplotype,” which as used herein refers to two or more polymorphic variants occurring within genomic DNA in a group of individuals within a population. For example, two SNPs may exist within a gene where each SNP position includes a cytosine variation and an adenine variation. Certain individuals in a population may carry one allele (heterozygous) or two alleles (homozygous) having the gene with a cytosine at each SNP position. As the two cytosines corresponding to each SNP in the gene travel together on one or both alleles in these individuals, the individuals can be characterized as having a cytosine/cytosine haplotype with respect to the two SNPs in the gene.

[0037] As used herein, the term “phenotype” refers to a trait which can be compared between individuals, such as presence or absence of a condition, a visually observable difference in appearance between individuals, metabolic variations, physiological variations, variations in the function of biological molecules, and the like. An example of a phenotype is occurrence of breast cancer.

[0038] Researchers sometimes report a polymorphic variant in a database without determining whether the variant is represented in a significant fraction of a population. Because a subset of these reported polymorphic variants are not represented in a statistically significant portion of the population, some of them are sequencing errors and/or not biologically relevant. Thus, it is often not known whether a reported polymorphic variant is statistically significant or biologically relevant until the presence of the variant is detected in a population of individuals and the frequency of the variant is determined. Methods for detecting a polymorphic variant in a population are described herein, specifically in Example 2. A polymorphic variant is statistically significant and often biologically relevant if it is represented in 5% or more of a population, sometimes 10% or more, 15% or more, or 20% or more of a population, and often 25% or more, 30% or more, 35% or more, 40% or more, 45% or more, or 50% or more of a population.

[0039] A polymorphic variant may be detected on either or both strands of a double-stranded nucleic acid. For example, a thymine at a particular position in SEQ ID NO: 1 can be reported as an adenine from the complementary strand. Also, a polymorphic variant may be located within an intron or exon of a gene or within a portion of a regulatory region such as a promoter, a 5′ untranslated region (UTR), a 3′ UTR, and in DNA (e.g., genomic DNA (gDNA) and complementary DNA (cDNA)), RNA (e.g., mRNA, tRNA, and rRNA), or a polypeptide. Polymorphic variations may or may not result in detectable differences in gene expression, polypeptide structure, or polypeptide function.

[0040] In the genetic analysis that associated breast cancer with the polymorphic variants described hereafter, samples from individuals having breast cancer and individuals not having cancer were allelotyped and genotyped. The term “genotyped” as used herein refers to a process for determining a genotype of one or more individuals, where a “genotype” is a representation of one or more polymorphic variants in a population. Genotypes may be expressed in terms of a “haplotype,” which as used herein refers to two or more polymorphic variants occurring within genomic DNA in a group of individuals within a population. For example, two SNPs may exist within a gene where each SNP position includes a cytosine variation and an adenine variation. Certain individuals in a population may carry one allele (heterozygous) or two alleles (homozygous) having the gene with a cytosine at each SNP position. As the two cytosines corresponding to each SNP in the gene travel together on one or both alleles in these individuals, the individuals can be characterized as having a cytosine/cytosine haplotype with respect to the two SNPs in the gene.

[0041] It was determined that polymorphic variations associated with an increased risk of breast cancer existed in ICAM, MAPK10, KIAA0861, NUMA1, GALE, DPF3 and LOC145197 nucleotide sequences. Polymorphic variants in and around the ICAM, MAPK10, KIAA0861, NUMA1, GALE, DPF3 and LOC145197 loci were tested for association with breast cancer. In the ICAM locus, these included polymorphic variants at positions selected from the group consisting of rs2884487, rs2358580, rs2304236, rs1059840, rs1059843, rs11115, rs1059849, rs1059855, rs5030386, rs5030339, rs5030387, rs5030388, rs1799766, rs5030389, rs5490, rs11575070, rs5030340, rs5030390, rs5030391, rs3093035, rs11667983, rs5030341, rs5030342, rs5030343, rs5030344, rs5030347, rs5030348, rs5030349, rs5030350, rs5030351, rs5491, rs5030352, rs5030353, rs10420063, rs11879117, rs5030354, rs5030355, rs281428, rs5030358, rs5030359, rs5030392, rs5030393, rs5030360, rs5030394, rs281429, rs5030361, rs5030362, rs281430, rs281431, rs5030395, rs5827095, rs281432, rs5030364, rs5030365, rs5030368, rs5030369, rs3073809, rs2358581, rs7258215, rs5030371, rs5030372, rs281433, rs5030374, rs5030375, rs5030397, rs281434, rs12462944, rs5030398, rs5030378, rs12459133, rs5030399, rs5492, rs1800019, rs1799969, rs5493, rs5030381, rs5494, rs3093033, rs5495, rs1801714, rs2071441, rs5496, rs5497, rs5030382, rs5030400, rs2071440, rs5499, rs3093032, rs1057981, rs5500, rs5501, rs5030383, rs281436, rs923366, rs281437, rs3093030, rs5030384, rs5030385, rs3810159, rs281438, rs3093029, rs2735442, rs2569693, rs281439, rs281440, rs2569694, rs11575073, rs2569695, rs2075741, rs11575074, rs2569696, rs2735439, rs2569697, rs2075742, rs2569698, rs11669397, rs901886, rs885742, rs2569699, rs11549918, rs2569700, rs2228615, rs2569701, rs2569702, rs2735440, rs2569703, rs10418913, rs1056536, rs2569704, rs11673661, rs10402760, rs2569706, rs2569707, rs2436545, rs2436546, rs2916060, rs2916059, rs2916058, rs2569708, rs735747, rs885743, rs710845, rs2569709, rs2569710, rs2569711, rs2569712, rs12610026, rs4804129, rs12150978, rs439843, rs892188, rs2291473, rs281416, rs281417, rs882589, rs1048941, rs281418, rs430092, rs368835, rs2358583, rs378395, rs395782, rs1045384, rs281427, rs3745264, rs281426, rs281425, rs281424, rs281423, rs281422, rs281420, rs3745263, rs3745262, rs3745261, rs3181049, rs281412, rs3181048, rs2230399, rs2278442, rs3181047, rs3181046, rs2304237, rs281413, rs1058154, rs3176769, rs2304238, rs2304239, rs2304240, rs3176768, rs3176767, rs3176766, rs281414, rs281415, position 45003 of SEQ ID NO: 1, and position 47504 of SEQ ID NO: 1. Polymorphic variants at the following positions in particular were associated with an increased risk of breast cancer: rs11115, rs1059849, rs5030391, rs5030382, rs3093030, rs2569693, rs2075741, rs901886, rs11549918, rs2228615, rs2569702, rs2569703, rs10402760, rs710845, rs892188, and rs281426. At these positions in SEQ ID NO: 1, a cytosine at position 11942, an adenine at position 12054, a guanine at position 24037, an adenine at position 37083, a cytosine at position 38803, a cytosine at position 41304, a guanine at position 42498, a thymine at position 43531, a cytosine at position 44338, a guanine at position 44768, a thymine at position 45347, a cytosine at position 45627, a thymine at position 47265, a cytosine at position 48569, a cytosine at position 51193, a guanine at position 72451, in particular were associated with risk of breast cancer. Also, a proline at amino acid position 352 or an alanine at amino acid position 348 in SEQ ID NO: 15 were in particular associated with an increased risk of breast cancer.

[0042] In the MAPK10 locus, these included polymorphic variants at positions selected from the group consisting of rs2575681, rs2575680, rs2589505, rs2589504, rs2164538, rs2575679, rs10305, rs2869408, rs2904086, rs934648, rs2589511, rs2060589, rs2164537, rs2575678, rs2575677, rs2589510, rs2589509, rs2164536, rs2164535, rs1946734, rs2589525, rs2589523, rs3755970, rs2575675, rs1202, rs1201, rs2589516, rs2575674, rs2589515, rs3733367, rs958, rs2589506, rs1436524, rs2575672, rs2589518, rs3775164, rs2589514, rs3775166, rs3775167, rs3822035, rs3775168, rs3775169, rs2043650, rs2043649, rs3775170, rs1541998, rs2282599, rs2282598, rs2282597, rs3775171, rs3775172, rs3775173, rs3775174, rs1469870, rs1436522, rs1946733, rs983362, rs3755971, rs3822036, rs3775175, rs1436525, rs3822037, rs3775176, rs993593, rs1436527, rs1436529, rs3775180, rs3775181, rs3775182, rs3775183, rs3775184, rs733245, rs3775185, rs1561154, rs3775186, rs3775187, rs1010778, rs2282596, rs2282595, rs2118044, rs1469869, position 21751 of SEQ ID NO: 2, position 30965 of SEQ ID NO: 2, position 36838 of SEQ ID NO: 2, position 36889 of SEQ ID NO: 2, position 38639 of SEQ ID NO: 2, position 38865 of SEQ ID NO: 2, position 38885 of SEQ ID NO: 2, position 38943 of SEQ ID NO: 2, position 39035 of SEQ ID NO: 2, position 39046 of SEQ ID NO: 2, and position 110704 of SEQ ID NO: 2. Polymorphic variants at the following positions in particular were associated with an increased risk of breast cancer: rs2575677, rs2575674, rs1436524, rs2575672, rs2589518, rs2589514, rs3775166, MAPK10-AB, rs3775168, rs2043650, rs2043649, rs1541998, position 38865 of SEQ ID NO: 2, position 39035 of SEQ ID NO: 2, position 39046 of SEQ ID NO: 2, rs1469870, and rs3775176. At these positions in SEQ ID NO: 2, a guanine at position 13918, an adenine at position 23841, an adenine at position 26072, a thymine at position 26376, an adenine at position 26614, an adenine at position 26827, a cytosine at position 27084, an adenine at position 30965, an adenine at position 32979, an adenine at position 35142, a thymine at position 35237, a cytosine at position 36439, a thymine at position 38865, a thymine at position 39035, a cytosine at position 39046, a cytosine at position 46191, and an adenine at position 62587, in particular were associated with risk of breast cancer.

[0043] In the KIAA0861 locus, these included polymorphic variants at positions selected from the group consisting of rs3811728, rs3811729, rs602646, rs488277, rs1629673, rs670232, rs575326, rs575386, rs684846, rs471365, rs496251, rs831246, rs831247, rs512071, rs1502761, rs681516, rs683302, rs619424, rs620722, rs529055, rs664010, rs678454, rs2653845, rs472795, rs507079, rs534333, rs535298, rs536213, rs831245, rs639690, rs684174, rs571761, rs1983421, rs4630966, rs2314415, rs6788196, rs2103062, rs9827084, rs9864865, rs6804951, rs6770548, rs1403452, rs7609994, rs9838250, rs9863404, rs903950, rs6787284, rs2017340, rs2001449, rs1317288, rs7635891, rs10704581, rs11371910, rs10937118, rs7642053, rs3821522, rs2029926, rs1390831, rs7643890, rs11925606, rs9826325, rs6800429, rs6803368, rs1353566, rs2272115, rs2272116, rs3732603, rs940055, rs2314730, rs2030578, rs2049280, rs3732602, rs2293203, rs7639705, and position 13507 of SEQ ID NO: 3. Polymorphic variants at the following positions in particular were associated with an increased risk of breast cancer: rs4630966, rs9827084, rs9864865, rs6804951, rs6770548, rs1403452, and rs2001449. At these positions in SEQ ID NO: 3, a cytosine at position 41716, a guanine at position 44775, a guanine at position 44962, a cytosine at position 45317, a guanine at position 45712, a thymine at position 45941, and a cytosine at position 48849, in particular were associated with risk of breast cancer. Also, an alanine at amino acid position 819 in SEQ ID NO: 22 (or position 902 in SEQ ID NO: 23) was in particular associated with an increased risk of breast cancer.

[0044] In the NUMA1 locus, these included polymorphic variants at positions corresponding to these selected from the group consisting of rs4945392, rs7938496, rs7926550, rs7945374, rs7949480, rs7102523, rs7121260, rs7131230, rs7128317, rs2276385, rs2276384, rs2276383, rs1892921, rs1892920, rs7942626, rs7124429, rs7114081, rs7125718, rs1055452, rs3829215, rs1541306, rs3814722, rs1939240, rs5743655, rs5743656, rs5743657, rs3814721, rs5743658, rs5743659, rs5743660, rs5743661, rs5743662, rs2298455, rs5743664, rs5743665, rs5743667, rs5743668, rs5743669, rs1573503, rs5743670, rs5743671, rs1892919, rs5743672, rs2735786, rs5743673, rs5743674, rs1062452, rs5743675, rs5743676, rs760246, rs11345794, rs5743677, rs5743678, rs14537, rs3168177, rs5743679, rs1541304, rs1053725, rs5743680, rs949324, rs949323, rs5743681, rs5743682, rs5743683, rs5743684, rs5743685, rs2845857, rs2852365, rs11538641, rs11538639, rs11235417, rs11538644, rs11538643, rs2845858, rs2155146, rs2852364, rs2845859, rs2845860, rs11538642, rs7949430, rs7938674, rs2735787, rs11538640, rs10736784, rs10736785, rs11826059, rs2503, rs2155145, rs4477459, position 26334 of SEQ ID NO: 4, rs5019605, rs5019604, rs5019603, rs3793941, rs11235418, rs3793940, rs2032353, rs3934448, rs7951267, rs1053603, rs1053602, rs11235419, rs1053601, rs3750913, rs3750912, rs1053600, rs1057992, rs2298789, rs10898813, position 34941 of SEQ ID NO: 4, rs949325, position 35629 of SEQ ID NO: 4, rs949326, rs2298456, rs7949845, rs7949989, rs1573500, rs4945411, rs11235422, rs10128658, rs2298457, rs3838779, rs1573501, rs11235424, rs10898814, rs7930142, rs7930544, rs7930721, rs7930722, rs6592456, rs11235425, rs6592457, rs10898815, rs11235426, rs10898816, rs1939247, rs1939246, rs1939245, rs1939244, rs1939243, rs4245463, rs4944258, rs7926751, rs12282917, rs12282918, rs7937582, rs10898817, rs7480015, rs7123992, rs1573502, rs7127865, rs4945426, rs11235428, rs7122489, rs1894003, rs1548348, rs1892923, rs5792570, rs7115200, rs4945430, rs11235429, rs1939242, rs9666346, rs7101553, rs7124000, rs12291664, rs12291778, rs12291781, rs12291787, rs12291788, rs12291833, rs10793016, rs5792571, rs12293529, rs4338555, rs11235431, rs6592458, rs4945434, rs4945435, rs11307657, rs5792573, rs1894004, rs12276164, rs4378421, rs7116495, rs7101701, rs10736786, rs11608165, rs645603, rs661290, rs7122209, rs12417471, rs541228, rs12273666, rs2511074, rs3018311, rs3018289, rs679926, rs567026, rs564294, rs678193, rs677279, rs560777, rs676721, rs7106529, rs11602304, rs585228, rs578957, rs7110215, rs3133233, rs3133230, rs12576024, rs674319, rs675185, rs5792574, rs12275272, rs10400327, rs612255, rs7101643, rs575871, rs547208, rs2511075, rs642573, rs482197, rs656640, rs671681, rs541022, rs951586, rs2511076, rs11235432, rs3018308, rs11606798, rs1791544, rs3018304, rs10751193, rs4945470, rs3018291, rs2511120, rs671132, rs4945475, rs3018292, rs642618, rs552966, rs6592459, rs607446, rs607070, rs10713307, rs3018302, rs3750909, rs3018301, rs2511114, rs12270166, rs12270241, rs11606587, rs686340, rs548961, rs549032, rs575831, rs575878, rs577435, rs579320, rs495567, rs636946, rs493065, rs597513, rs598835, rs10683614, rs610004, rs610041, rs673478, rs670802, rs505041, rs2511116, rs628025, rs517837, rs615000, rs482013, rs693391, rs2511079, rs2250866, rs2508860, rs7483267, rs2511078, rs2508859, rs2508858, rs11235435, rs11235436, rs639435, rs12285624, position 112784 of SEQ ID NO: 4, rs624363, position 113614 of SEQ ID NO: 4, rs1053573, rs1053511, rs1063863, rs12137, rs4365081, rs4466868, rs3750911, rs510925, rs595062, rs1053443, rs542752, rs3897579, rs11235437, rs2508856, rs5792575, rs659513, rs10898820, rs2276397, rs3750908, rs3793938, rs602285, rs2276396, rs2276395, rs1806778, rs4073394, rs471547, rs606136, rs605241, rs686063, rs685749, rs533207, rs476753, position 191149 of SEQ ID NO: 4, rs11278712, and rs3831387. Polymorphic variants at the following positions in particular were associated with an increased risk of breast cancer: rs7949480, rs7121260, rs7128317, rs2276385, rs2276383, rs1892921, rs1541306, rs3814721, rs1892919, rs2852365, rs3750913, position 34941 in SEQ ID NO: 4, rs949325, position 35629 in SEQ ID NO: 4, rs2298456, rs1573500, rs4945411, rs10128658, rs2298457, rs3838779, rs10898814, rs7930142, rs7930544, rs7930722, rs1939247, rs1939243, rs4245463, rs4944258, rs7926751, rs1573502, rs7127865, rs1894003, rs4945430, rs1939242, rs10793016, rs4945434, rs678193, rs560777, rs676721, rs585228, rs675185, rs5792574, rs2511075, rs541022, rs1791544, rs642618, rs552966, rs607446, rs3018302, rs3018301, rs2511114, rs548961, rs579320, rs495567, rs493065, rs610004, rs610041, rs673478, rs670802, rs2511116, rs615000, rs482013, rs2511079, rs2250866, rs2508858, rs2276396, and rs11278712. At these positions in SEQ ID NO: 4, a thymine at position 3146, a guanine at position 6124, an adenine at position 6925, a guanine at position 7060, an adenine at position 7090, a cytosine at position 7696, a cytosine at position 13571, a guanine at position 14830, a cytosine at position 17733, a guanine at position 20776, a guanine at position 31726, a cytosine at position 34941, an adenine at position 35214, a guanine at position 35629, a thymine at position 36273, a cytosine at position 38348, a guanine at position 38608, a cytosine at position 39077, a thymine at position 39769, a thymine at position 40555, a thymine at position 42063, a cytosine at position 42574, a cytosine at position 42912, a cytosine at position 43042, a thymine at position 46079, a cytosine at position 48293, a cytosine at position 48771, a thymine at position 48951, a thymine at position 49972, a guanine at position 52986, a guanine at position 53339, a thymine at position 55834, a guanine at position 58703, a cytosine at position 59140, a guanine at position 60621, a cytosine at position 64645, a thymine at position 75831, a thymine at position 76160, a cytosine at position 76196, a cytosine at position 78847, a thymine at position 81130, a deletion at position 81452, a thyrnine at position 85815, a guanine at position 88614, a cytosine at position 90515, a cytosine at position 93751, an adenine at position 93775, a cytosine at position 94810, a thymine at position 96500, an adenine at position 97629, a thymine at position 97705, a guanine at position 99445, a guanine at position 100512, a cytosine at position 101046, an adenine at position 102487, a cytosine at position 103497, an adenine at position 103526, a cytosine at position 104662, a thymine at position 105226, a cytosine at position 107718, a thymine at position 108510, a cytosine at position 109520, a cytosine at position 109712, a thymine at position 110071, a cytosine at position 110963, a guanine at position 129463, and a “GTCAAC” at positions 34468-34472, in particular were associated with risk of breast cancer.

[0045] In the GALE locus, these included polymorphic variants at positions selected from the group consisting of rs627451, rs12082331, rs2267960, rs7519640, rs12086741, rs3934189, rs12135415, rs12088267, rs12084665, rs550850, rs557227, rs12137502, rs12118858, rs2294495, rs12401650, rs2235541, rs520713, rs550252, position 12668 of SEQ ID NO: 5, rs12093683, rs10917421, rs2744873, rs12091764, position 15761 of SEQ ID NO: 5, rs2076345, rs2076346, rs2473379, rs6679300, rs11811395, rs8179467, rs8179468, rs10917423, rs7536699, rs3215497, rs1000213, rs1000212, rs1000211, rs1045017, rs12059520, rs2143118, rs12126804, rs533276, rs12402174, rs2864110, rs11581873, rs12062449, rs12033190, rs10157566, rs486746, rs11802707, rs6668550, rs7410946, rs7410970, rs6657558, rs2143119, rs7514394, rs11591202, rs6673991, position 37720 of SEQ ID NO: 5, rs12034848, rs2502984, rs3831910, rs11379444, rs725119, rs10917425, rs12077788, rs12077830, rs2473380, rs2473381, rs11545132, rs1046924, rs4237, rs4375317, rs11584220, rs2232975, rs2502985, rs3835423, rs2232976, rs2232977, rs2232978, rs2232979, rs2232980, rs2232981, rs2232982, rs2232983, rs2232984, rs2232985, rs2232986, rs2745, rs2744, rs11546127, rs1049988, rs1803613, rs1803612, position 55821 of SEQ ID NO: 5, rs3209973, rs3180545, rs3180383, rs3177814, rs3180546, rs3180547, rs11805398, rs760941, rs3177813, rs3180548, rs3179864, rs3177812, rs3179863, rs6692104, rs3180549, rs3179862, rs3177811, rs3177810, rs3180382, rs11546126, rs7551384, rs12141511, rs2473382, rs12038166, rs6666908, rs12041159, rs12031592, rs1062598, rs11714, rs3203593, rs1042436, rs2076343, rs12131539, rs11583935, rs12140263, rs3835225, rs2473374, rs2256179, rs974698, rs1018396, rs719399, rs719400, rs2502986, rs6679378, rs2473375, rs2473376, rs12136455, rs2502987, rs11551767, rs11591205, rs12083298, rs12138604, rs12136042, rs12138606, rs12136045, rs12116596, rs12138610, rs12136069, rs12116617, rs7540056, rs12044452, rs2076344, rs11588187, rs6696932, rs12025531, rs6682888, rs2982390, rs2179394, rs2473377, rs2179395, rs2502978, rs2502979, rs6698535, rs2502980, rs6697805, rs6424114, rs5773058, rs4649114, rs6424115 and rs10554242. Polymorphic variants at the following positions in particular were associated with an increased risk of breast cancer: rs2294495, position 15761 of SEQ ID NO: 5, rs8179467, rs11591202, rs12034848, rs3831910, rs4237, rs2232982, rs12041159, rs2076343, rs1018396, rs12044452, rs2982390, rs2502980, rs6697805, and rs10554242. At these positions in SEQ ID NO: 5, a cytosine at position 9351, a thymine at position 15761, a thymine at position 18220, an adenine at position 35555, a thymine at position 38304, an adenine at position 39985, an adenine at position 47604, a thymine at position 53102, a guanine at position 61135, an adenine at position 62601, a thymine at position 67087, a guanine at position 77120, a cytosine at position 81305, a cytosine at position 83464, a cytosine at position 85471, and a deletion at positions 83916-83920, in particular were associated with risk of breast cancer.

[0046] In the DPF3 locus, these included polymorphic variants at positions selected from the group consisting of rs11846274, rs2526935, rs929328, rs3742840, rs9671739, rs8006208, rs8006230, rs8007836, rs8006889, rs8010823, rs8011029, rs10649920, rs2803956, rs2803957, rs2526934, rs9671558, rs2526933, rs2803959, rs2526932, rs2803960, rs12434675, rs4899435, rs2526931, rs2803961, rs2803962, rs12590634, rs11327712, rs2803963, rs11844834, rs11320415, rs8012752, rs11623878, rs11623926, rs12434442, rs2526930, rs12435306, rs10144028, rs4899436, rs7140593, rs2107687, rs991882, rs3327, rs2526928, rs7401336, rs2526926, rs994760, rs994759, rs994758, rs11848404, rs2526925, rs11844236, rs2526924, rs2803965, rs2526923, rs7152467, rs11623462, rs2803966, rs2526922, rs2526920, rs11848135, rs11629210, rs2803967, rs16455, rs757655, rs5809581, rs3057139, rs2247658, rs11625609, rs8005580, rs8010472, rs2526919, rs2803968, rs11623943, rs11623946, rs1557926, rs12434611, rs2526918, rs5809582, rs8008279, rs2803969, rs2526917, rs8008774, rs2803970, rs8010255, rs2997642, rs2803971, rs11313760, rs2803972, rs4903038, rs2526916, rs4903040, rs2803974, rs2803975, rs2803976, rs2803977, rs10139909, rs722945, rs917069, rs2803978, rs2332890, rs1989638, rs10679174, rs2526915, rs2526914, rs11158964, rs11158965, rs740081, rs740080, rs10140582, rs2526913, rs4899437, rs10145678, rs2107686, rs2107685, rs2107684, rs7154188, rs4903041, rs7159637, rs6574089, rs12589753, rs4899438, rs4903042, rs4903043, rs2803980, rs10483848, rs2240344, rs2286068, rs11339669, rs3854, rs11463, rs1383, rs1381, rs1377, rs11158966, rs11158967, rs11158968, rs11158969, rs11158970, rs11158971, rs11849782, rs10137616, rs757572, rs10140566, rs2023480, rs2526911, rs4903044, rs11845162, rs12147210, rs2997643, rs2997644, rs3814867, rs2286067, rs1060570, rs2332891, rs2021736, rs7160830, rs2526909, rs7140963, rs10143667, rs2803981, rs768840, rs5809587, rs2023479, rs4903045, rs4903046, rs5809588, rs10220555, rs2906132, rs11848482, rs10129954, rs2526921, rs4903047, rs11846357, rs10136385, rs12588242, rs11621517, rs2526910, rs2526941, rs2803944, rs12436770, rs10220279, rs10220280, rs11844112, rs12432455, rs8015338, rs3832969, rs9671972, rs9671975, rs7159986, rs11848220, rs5016369, rs1986423, rs2332909, rs8013337, rs11445680, rs4903048, rs12434793, rs2332910, rs4410017, rs4577019, rs2332911, rs4996747, rs10140820, rs12431623, rs6574090, rs8008750, rs11627420, rs10150185, rs10150218, rs9646164, rs6574091, rs2332912, rs7155359, rs2332913, rs4544184, rs4337224, rs2332914, rs4280167, rs4903049, rs3742837, rs10139937, rs12434292, rs11620671, rs10140184, rs2332915, rs2332916, rs8012759, rs10149272, rs11158973, rs4903050, rs10666445, rs2536143, rs10638231, rs12431636, rs8005904, rs11621058, rs10133224, rs12433185, rs740974, rs740973, rs740972, rs740971, rs4243642, rs4415952, rs2215589, rs4343211, rs2536142, rs11293340, rs10151620, rs2286840, rs8023089, rs8008009, rs11419089, rs10694676, rs2536141, rs765247, rs7147626, rs10132629, rs4903051, rs11158974, rs1035021, rs6574093, rs4899439, rs7155287, rs7154402, rs7154781, rs6574094, rs10132242, rs10146959, rs10147466, rs11626411, rs4899440, rs10144553, rs11627663, rs11627799, rs11851733, rs10140317, rs8007375, rs4899441, rs11158975, rs11419607, rs2109793, rs8023156, rs10140579, rs7148199, rs7146916, rs1990439, rs6574095, rs10140037, rs8007249, rs1990438, rs1990437, rs10146484, rs11627333, rs7155802, rs2109792, rs11429363, rs8004210, rs2098194, rs2109791, rs11381729, rs1160094, rs11628051, rs10136771, rs10139903, rs4903053, rs3742836, rs3742835, rs8003233, rs11621588, rs740981, rs8019492, rs8019644, rs8019646, rs8019653, rs11450794, rs11348193, rs11450793, rs11282735, rs2191823, rs12232220, rs11158976, rs4903054, rs11846755, rs12431988, rs12100526, rs11622568, rs9671230, rs12147487, rs4903055, rs12147515, rs11625092, rs4899442, rs2052146, rs10220553, rs10220565, rs2332917, rs7158910, rs8015749, rs8006812, rs8008338, rs2052145, rs2052144, rs10146692, rs11627305, rs2079989, rs8018881, rs4561387, rs11622025, rs740980, rs12433250, rs5809590, rs758915, rs758914, rs7154229, rs12437188, rs7159108, rs4903058, rs4899443, rs11848907, rs12432148, rs12435078, rs6574096, rs11158977, rs11629434, rs4378563, rs2098195, rs4633653, rs7148350, rs740979, rs740978, rs740977, rs740976, rs4903059, rs4903060, rs11852056, rs9635257, rs9635258, rs9635259, rs4899444, rs12435382, rs12435412, rs11627381, rs2052143, rs2052142, rs2052141, rs8021035, rs11158978, rs11621216, rs10130873, rs11621358, rs758913, rs11622602, rs10136931, rs740975, rs747987, rs11623819, rs12434445, rs8003375, rs10143596, rs12435321, rs12435401, rs8010609, rs11158979, rs11158980, rs11627524, rs1126160, rs10136074, rs4903061, rs10665398, rs6574097, rs9671654, rs10140024, rs10142421, rs10142593, rs11423372, rs5809592, rs2332918, rs2332919, rs8007348, rs1990443, rs8007690, rs3937455, rs8012823, rs4899445, rs4903062, rs973963, rs10149962, rs8003449, rs11620775, rs8009089, rs8008967, rs12050132, rs10133018, rs1990442, rs1990441, rs8015833, rs1990440, rs4903063, rs10139810, rs4903064, rs2159715, rs2109795, rs2159714, rs11623107, rs7152005, rs7152489, rs4479167, rs4606655, rs4606656, rs4489943, rs7142642, rs8006233, rs8007559, rs8006156, rs1468662, rs11627048, rs6574098, rs12433760, rs12433780, rs12434506, rs12434673, rs12431400, rs12431384, rs4903067, rs2332920, rs2215591, rs12433064, rs12436263, rs12433097, rs12433184, rs8015900, rs11296981, rs11344025, rs11464204, rs11441172, rs11381807, rs10873251, rs2109794, rs10873252, rs4520784, rs2877820, rs2877821, rs4569195, rs11628905, rs2191822, rs2191821, rs11464689, rs12431959, rs4903068, rs1544579, rs7155879, rs12433603, rs11351432, rs11448438, rs4243643, rs4140952, rs8005372, rs8004109, rs8008398, rs8009692, rs2332921, rs12050320, rs12050323, rs8010316, rs7154293, rs12147969, rs2215590, rs4265749, rs1004552, rs4307892, rs12431973, rs12431975, rs767874, rs11628597, rs10129371, rs4903069, rs4903070, rs4903071, rs11622224, rs10459455, rs9323577, rs10624648, rs3058953, rs11158981, rs11158982, rs11158983, rs1860750, rs1860749, rs1860748, rs1860747, rs11419679, rs8011777, rs6574099, rs8010957, rs11626895, rs10151431, rs4903072, rs4589489, rs9671327, rs4899446, rs10144501, rs5809594, rs720317, rs8014316, rs11158984, rs6420906, rs8004055, rs12434800, rs4243644, rs4899447, rs4903073, rs11848634, rs4899448, rs10131564, rs10134150, rs763388, rs11845938, rs11845946, rs11845915, rs10137463, rs6574100, rs7140344, rs10646889, rs7146287, rs5809595, rs1035099, rs7159877, rs7142579, rs12431762, rs12431764, rs10647999, rs6574101, rs6574102, rs1861162, rs12432972, rs10146134, rs10146616, rs10146769, rs8018936, rs10483849, rs2160137, rs2192595, rs2192594, rs11271695, rs10747301, rs12050363, rs12050368, rs12432949, rs7401375, rs8019682, rs8021248, rs11158985, rs10483850, rs8010875, rs11626844, rs982972, rs7161198, rs7160347, rs8007139, rs8014483, rs12437072, rs8004767, rs12588830, rs7158449, rs6574103, rs8020478, rs4903077, rs8012359, rs4899449, rs10690289, rs6574104, rs2110552, rs8008256, rs759283, rs4999177, rs2333006, rs8006178, rs11158986, rs7150625, rs8007768, rs8007058, position 284742 of SEQ ID NO: 6, rs2215901, rs3814866, rs3814864, and rs10605948. Polymorphic variants at the following positions in particular were associated with an increased risk of breast cancer: rs3327, rs2526926, rs2526914, rs2526913, rs2526921, rs7159986, rs2332916, rs10132242, rs11627663, rs4899441, rs7148199, rs1990437, rs8004210, rs8019653, rs12232220, rs4899442, rs2332917, rs8015749, rs12437188, rs12432148, rs4378563, rs740978, rs740976, rs4903059, rs4903060, rs9635259, rs2052142, rs758913, rs747987, rs11423372, rs5809592, rs8007348, rs4899445, rs4903062, rs1990440, rs4479167, rs4606655, rs4606656, rs4489943, rs8007559, rs8006156, rs12431400, rs12431384, rs12433097, rs12433184, rs2877821, rs4569195, rs11628905, rs2191822, rs12433603, rs11448438, rs8009692, rs4265749, rs4307892, rs12431975, rs4903071, rs1860749, rs1860748, rs8010957, rs6420906, rs12434800, rs7142579, rs8010875, rs8004767, rs4899449, and rs10605948. At these positions in SEQ ID NO: 6, a thymine at position 17641, a thymine at position 19527, a thymine at position 40889, an adenine at position 44877, a cytosine at position 75061, a thymine at position 86006, a cytosine at position 106988, a guanine at position 122783, a cytosine at position 125329, an adenine at position 127544, a cytosine at position 131734, a cytosine at position 137499, an adenine at position 139319, a guanine at position 147479, a guanine at position 150798, a guanine at position 160835, a guanine at position 163447, a guanine at position 164377, a cytosine at position 171972, a guanine at position 173467, a thymine at position 177780, a guanine at position 179608, a thymine at position 179808, a cytosine at position 180041, a guanine at position 181420, a guanine at position 182248, a guanine at position 185633, a guanine at position 188352, a thymine at position 189444, a cytosine at position 196415, a cytosine at position 196417, an adenine at position 196621, a guanine at position 197612, a cytosine at position 197854, a guanine at position 201045, a cytosine at position 205135, a thymine at position 205269, a thymine at position 205323, an adenine at position 205364, an adenine at position 206786, a guanine at position 206796, a thymine at position 209750, a guanine at position 209817, a guanine at position 211659, a thymine at position 211757, an adenine at position 213029, a guanine at position 213095, a cytosine at position 214247, a cytosine at position 214807, a guanine at position 217143, a guanine at position 217725, a thymine at position 218890, a thymine at position 222234, an adenine at position 222458, an adenine at position 222749, a thymine at position 227815, an adenine at position 233670, a cytosine at position 233702, a guanine at position 237317, a thymine at position 242360, an adenine at position 243355, an adenine at position 251858, a guanine at position 267130, a cytosine at position 273399, a guanine at position 277166, and a deletion at positions 250079-250082, in particular were associated with risk of breast cancer.

[0047] In the LOC145197 locus, these included polymorphic variants at positions selected from the group consisting of rs2895907, rs2401019, rs2401020, rs2401021, rs1999611, rs1999610, rs1999609, rs2275016, rs2275015, rs3818772, rs10149458, rs7142383, rs11343023, rs11160641, rs12586334, rs10142208, rs7493230, rs5811036, rs10151926, rs12435354, rs7151007, rs11160642, rs11160643, rs11626687, rs4906112, rs8016071, rs11623698, rs7401628, rs8015995, rs10873526, rs11160644, rs10134252, rs1959030, rs9707396, rs2401022, rs4622448, rs10141019, rs10141096, rs11621063, rs12434632, rs12100901, rs12434655, rs9944103, rs7153189, rs7158860, rs12437080, rs11851768, rs12431943, rs4309341, rs4329858, rs10690268, rs2401023, rs1054745, rs8019453, rs12431510, rs7141067, rs12431547, rs7142316, rs1959029, rs1959028, rs11376292, rs11376755, rs7145420, rs8013347, rs2144070, rs11850135, rs11850138, rs1955617, rs11621899, rs4900508, rs4906116, rs4906117, rs2235972, rs2235973, rs2235974, rs2235975, rs7149416, rs11850809, rs10140476, rs12437309, rs6575852, rs4906118, rs11428825, rs11450744, rs1999612, rs1889368, rs1889367, rs1889366, rs3077388, rs1889365, rs1955615, rs1569807, rs2064491, rs2064492, rs761532, rs1955616, rs2144065, rs2144066, rs2895908, rs2401043, rs1007904, rs3891113, rs3891114, rs730812, rs1884068, and rs1884069. Polymorphic variants at the following positions in particular were associated with an increased risk of breast cancer: rs12437080, rs12431943, rs1054745, rs8019453, rs12431547, rs1959029, rs1959028, rs8013347, rs2235972, rs2235973, rs2235974, and rs2895908. At these positions in SEQ ID NO: 7, a guanine at position 41414, an adenine at position 42821, an adenine at position 46344, a cytosine at position 46669, an adenine at position 47293, a guanine at position 49821, a thymine at position 49875, a thymine at position 51912, a cytosine at position 55799, a cytosine at position 55995, an adenine at position 56042, and an adenine at position 75221, in particular were associated with risk of breast cancer.

[0048] Based in part upon analyses summarized in FIGS. 1A-1G, regions with significant association have been identified in ICAM, MAPK10, KIAA0861, NUMA1, GALE, DPF3 and LOC145197 regions associated with increased risk of breast cancer. Any polymorphic variants associated with an increased risk of breast cancer in a region of significant association can be utilized for embodiments described herein. The following reports such a region, where “begin” and “end” designate the boundaries of the region according to chromosome positions within NCBI's Genome Build 34. For example, a region spanning positions 184215647 to 184249849 in the KIAA0861 locus was significantly associated with an increased risk of breast cancer.

| rs # | Region | Region of Association | | Distance |
|---|---|---|---|---|
| 4237 | HT014 region | 23545351 | 23622196 | 76845 |
| 2001449 | KIAA0861 | 184215647 | 184249849 | 34202 |
| 1541998 | MAPK10 | 87386018 | 87442874 | 56856 |
| 673478 | NUMA1 | 71423896 | 71531713 | 107817 |
| 1054745 | LOC145197 | 99895564 | 99929371 | 33807 |
| 1990440 | DPF3 | 71078327 | 71343316 | 264989 |
| 11549918 | ICAM1,4,5 | 10231542 | 10268169 | 36627 |

[0049] The embodiments described hereafter may be directed to any of the polymorphic variants described herein. Sometimes, embodiments are directed to any of the polymorphic variants described herein with the proviso that the embodiments are not directed to a polymorphic variant at one or more positions selected from the group consisting of rs11549918, rs1541998, rs2001449, rs673478, rs4237, rs1990440 and rs1054745.

[0050] Additional Polymorphic Variants Associated with Breast Cancer

[0051] Also provided is a method for identifying polymorphic variants proximal to an incident, founder polymorphic variant associated with breast cancer. Thus, featured herein are methods for identifying a polymorphic variation associated with breast cancer that is proximal to an incident polymorphic variation associated with breast cancer, which comprises identifying a polymorphic variant proximal to the incident polymorphic variant associated with breast cancer, where the incident polymorphic variant is in a nucleotide sequence set forth in SEQ ID NO: 1-7. The nucleotide sequence often comprises a polynucleotide sequence selected from the group consisting of (a) a nucleotide sequence set forth in SEQ ID NO: 1-7; (b) a nucleotide sequence which encodes a polypeptide having an amino acid sequence encoded by a nucleotide sequence in SEQ ID NO: 1-7; (c) a nucleotide sequence which encodes a polypeptide that is 90% or more identical to an amino acid sequence encoded by a nucleotide sequence in SEQ ID NO: 1-7 or a nucleotide sequence about 90% or more identical to the nucleotide sequence set forth in SEQ ID NO: 1-7; and (d) a fragment of a nucleotide sequence of (a), (b), or (c), often a fragment that includes a polymorphic site associated with breast cancer. The presence or absence of an association of the proximal polymorphic variant with breast cancer then is determined using a known association method, such as a method described in the Examples hereafter. In an embodiment, the incident polymorphic variant is described in SEQ ID NO: 1-7. In another embodiment, the proximal polymorphic variant identified sometimes is a publicly disclosed polymorphic variant, which for example, sometimes is published in a publicly available database. In other embodiments, the polymorphic variant identified is not publicly disclosed and is discovered using a known method, including, but not limited to, sequencing a region surrounding the incident polymorphic variant in a group of nucleic acid samples. Thus, multiple polymorphic variants proximal to an incident polymorphic variant are associated with breast cancer using this method.

[0052] The proximal polymorphic variant often is identified in a region surrounding the incident polymorphic variant. In certain embodiments, this surrounding region is about 50 kb flanking the first polymorphic variant (e.g. about 50 kb 5′ of the first polymorphic variant and about 50 kb 3′ of the first polymorphic variant), and the region sometimes is composed of shorter flanking sequences, such as flanking sequences of about 40 kb, about 30 kb, about 25 kb, about 20 kb, about 15 kb, about 10 kb, about 7 kb, about 5 kb, or about 2 kb 5′ and 3′ of the incident polymorphic variant. In other embodiments, the region is composed of longer flanking sequences, such as flanking sequences of about 55 kb, about 60 kb, about 65 kb, about 70 kb, about 75 kb, about 80 kb, about 85 kb, about 90 kb, about 95 kb, or about 100 kb 5′ and 3′ of the incident polymorphic variant.

[0053] In certain embodiments, polymorphic variants associated with breast cancer are identified iteratively. For example, a first proximal polymorphic variant is associated with breast cancer using the methods described above and then another polymorphic variant proximal to the first proximal polymorphic variant is identified (e.g., publicly disclosed or discovered) and the presence or absence of an association of one or more other polymorphic variants proximal to the first proximal polymorphic variant with breast cancer is determined.

[0054] The methods described herein are useful for identifying or discovering additional polymorphic variants that may be used to further characterize a gene, region or loci associated with a condition, a disease (e.g., breast cancer), or a disorder. For example, allelotyping or genotyping data from the additional polymorphic variants may be used to identify a functional mutation or a region of linkage disequilibrium.

[0055] In certain embodiments, polymorphic variants identified or discovered within a region comprising the first polymorphic variant associated with breast cancer are genotyped using the genetic methods and sample selection techniques described herein, and it can be determined whether those polymorphic variants are in linkage disequilibrium with the first polymorphic variant. The size of the region in linkage disequilibrium with the first polymorphic variant also can be assessed using these genotyping methods. Thus, provided herein are methods for determining whether a polymorphic variant is in linkage disequilibrium with a first polymorphic variant associated with breast cancer, and such information can be used in prognosis methods described herein.

[0056] Isolated ICAM, MAPK10, KIAA0861. NUMA1. GALE, DPF3 and LOC145197 Nucleic Acids

[0057] Featured herein are isolated ICAM, MAPK10, KIAA0861, NUMA1, GALE, DPF3 or LOC145197 nucleic acids, which include the nucleic acid having the nucleotide sequence of SEQ ID NO: 1, 2, 3, 4, 5, 6, 7, 8, 9, 10 or 11, nucleic acid variants, and substantially identical nucleic acids of the foregoing. Nucleotide sequences of the ICAM, MAPK10, KIAA0861, NUMA1, GALE, DPF3 or LOC145197 nucleic acids sometimes are referred to herein as “ICAM, MAPK10, KIAA0861, NUMA1, GALE, DPF3 or LOC145197 nucleotide sequences.” An “ICAM, MAPK10, KIAA0861, NUMA1, GALE, DPF3 or LOC145197 nucleic acid variant” refers to one allele that may have one or more different polymorphic variations as compared to another allele in another subject or the same subject. A polymorphic variation in the ICAM, MAPK10, KIAA0861, NUMA1, GALE, DPF3 or LOC145197 nucleic acid variant may be represented on one or both strands in a double-stranded nucleic acid or on one chromosomal complement (heterozygous) or both chromosomal complements (homozygous).

[0058] As used herein, the term “nucleic acid” includes DNA molecules (e.g., a complementary DNA (cDNA) and genomic DNA (gDNA)) and RNA molecules (e.g., mRNA, rRNA, and tRNA) and analogs of DNA or RNA, for example, by use of nucleotide analogs. The nucleic acid molecule can be single-stranded and it is often double-stranded. The term “isolated or purified nucleic acid” refers to nucleic acids that are separated from other nucleic acids present in the natural source of the nucleic acid. For example, with regard to genomic DNA, the term “isolated” includes nucleic acids which are separated from the chromosome with which the genomic DNA is naturally associated. An “isolated” nucleic acid is often free of sequences which naturally flank the nucleic acid (i.e., sequences located at the 5′ and/or 3′ ends of the nucleic acid) in the genomic DNA of the organism from which the nucleic acid is derived. For example, in various embodiments, the isolated nucleic acid molecule can contain less than about 5 kb, 4 kb, 3 kb, 2 kb, 1 kb, 0.5 kb or 0.1 kb of 5′ and/or 3′ nucleotide sequences which flank the nucleic acid molecule in genomic DNA of the cell from which the nucleic acid is derived. Moreover, an “isolated” nucleic acid molecule, such as a cDNA molecule, can be substantially free of other cellular material, or culture medium when produced by recombinant techniques, or substantially free of chemical precursors or other chemicals when chemically synthesized. As used herein, the term “ICAM, MAPK10, KIAA0861, NUMA1, GALE, DPF3 or LOC145197 gene” refers to a nucleotide sequence that encodes a ICAM, MAPK10, KIAA0861, NUMA1, GALE, DPF3 or LOC145197 polypeptide.

[0059] Also included herein are nucleic acid fragments. These fragments typically are a nucleotide sequence identical to a nucleotide sequence in SEQ ID NO: 1-17, a nucleotide sequence substantially identical to a nucleotide sequence in SEQ ID NO: 1-17, or a nucleotide sequence that is complementary to the foregoing. The nucleic acid fragment may be identical, substantially identical or homologous to a nucleotide sequence in an exon or an intron in SEQ ID NO: 1-7, and may encode a domain or part of a domain or motif of a ICAM, MAPK10, KIAA0861, NUMA1, GALE, DPF3 or LOC145197 polypeptide. Sometimes, the fragment will comprises the polymorphic variation described herein as being associated with breast cancer. The nucleic acid fragment sometimes is 50, 100, or 200 or fewer base pairs in length, and is sometimes about 300, 400, 500, 600, 700, 800, 900, 1000, 1100, 1200, 1300, 1400, 1500, 1600, 1700, 1800, 1900, 2000, 2100, 2200, 2300, 2400, 2500, 2600, 2700, 2800, 2900, 3000, 3100, 3200, 3300, 3400, 3500, 3600, 3800, 4000, 5000, 6000, 7000, 8000, 9000, 10000, 15000, 20000, 30000, 40000, 50000, 60000, 70000, 80000, 90000, 100000, 110000, 120000, 130000, 140000, 150000 or 160000 base pairs in length. A nucleic acid fragment complementary to a nucleotide sequence identical or substantially identical to the nucleotide sequence of SEQ ID NO: 1-17 and hybridizes to such a nucleotide sequence under stringent conditions often is referred to as a “probe.” Nucleic acid fragments often include one or more polymorphic sites, or sometimes have an end that is adjacent to a polymorphic site as described hereafter.

[0060] An example of a nucleic acid fragment is an oligonucleotide. As used herein, the term “oligonucleotide” refers to a nucleic acid comprising about 8 to about 50 covalently linked nucleotides, often comprising from about 8 to about 35 nucleotides, and more often from about 10 to about 25 nucleotides. The backbone and nucleotides within an oligonucleotide may be the same as those of naturally occurring nucleic acids, or analogs or derivatives of naturally occurring nucleic acids, provided that oligonucleotides having such analogs or derivatives retain the ability to hybridize specifically to a nucleic acid comprising a targeted polymorphism. Oligonucleotides described herein may be used as hybridization probes or as components of prognostic or diagnostic assays, for example, as described herein.

[0061] Oligonucleotides are typically synthesized using standard methods and equipment, such as the ABI 3900 High Throughput DNA Synthesizer and the EXPEDITE™ 8909 Nucleic Acid Synthesizer, both of which are available from Applied Biosystems (Foster City, Calif.). Analogs and derivatives are exemplified in U.S. Pat. Nos. 4,469,863; 5,536,821; 5,541,306; 5,637,683; 5,637,684; 5,700,922; 5,717,083; 5,719,262; 5,739,308; 5,773,601; 5,886,165; 5,929,226; 5,977,296; 6,140,482; WO 00/56746; WO 01/14398, and related publications. Methods for synthesizing oligonucleotides comprising such analogs or derivatives are disclosed, for example, in the patent publications cited above and in U.S. Pat. Nos. 5,614,622; 5,739,314; 5,955,599; 5,962,674; 6,117,992; in WO 00/75372; and in related publications.

[0062] Oligonucleotides also may be linked to a second moiety. The second moiety may be an additional nucleotide sequence such as a tail sequence (e.g., a polyadenosine tail), an adapter sequence (e.g., phage M13 universal tail sequence), and others. Alternatively, the second moiety may be a non-nucleotide moiety such as a moiety which facilitates linkage to a solid support or a label to facilitate detection of the oligonucleotide. Such labels include, without limitation, a radioactive label, a fluorescent label, a chemiluminescent label, a paramagnetic label, and the like. The second moiety may be attached to any position of the oligonucleotide, provided the oligonucleotide can hybridize to the nucleic acid comprising the polymorphism.

Uses for Nucleic Acid Sequences

[0063] Nucleic acid coding sequences depicted in SEQ ID NO: 1-17 may be used for diagnostic purposes for detection and control of polypeptide expression. Also, included herein are oligonucleotide sequences such as antisense RNA, small-interfering RNA (siRNA) and DNA molecules and ribozymes that function to inhibit translation of a polypeptide. Antisense techniques and RNA interference techniques are known in the art and are described herein.

[0064] Ribozymes are enzymatic RNA molecules capable of catalyzing the specific cleavage of RNA. The mechanism of ribozyme action involves sequence specific hybridization of the ribozyme molecule to complementary target RNA, followed by a endonucleolytic cleavage. Ribozymes may be engineered hammerhead motif ribozyme molecules that specifically and efficiently catalyze endonucleolytic cleavage of RNA sequences corresponding to or complementary to the nucleotide sequences set forth in SEQ ID NO: 1-17. Specific ribozyme cleavage sites within any potential RNA target are initially identified by scanning the target molecule for ribozyme cleavage sites which include the following sequences, GUA, GUU and GUC. Once identified, short RNA sequences of between fifteen (15) and twenty (20) ribonucleotides corresponding to the region of the target gene containing the cleavage site may be evaluated for predicted structural features such as secondary structure that may render the oligonucleotide sequence unsuitable. The suitability of candidate targets may also be evaluated by testing their accessibility to hybridization with complementary oligonucleotides, using ribonuclease protection assays.

[0065] Antisense RNA and DNA molecules, siRNA and ribozymes may be prepared by any method known in the art for the synthesis of RNA molecules. These include techniques for chemically synthesizing oligodeoxyribonucleotides well known in the art such as solid phase phosphoramidite chemical synthesis. Alternatively, RNA molecules may be generated by in vitro and in vivo transcription of DNA sequences encoding the antisense RNA molecule. Such DNA sequences may be incorporated into a wide variety of vectors which incorporate suitable RNA polymerase promoters such as the T7 or SP6 polymerase promoters. Alternatively, antisense cDNA constructs that synthesize antisense RNA constitutively or inducibly, depending on the promoter used, can be introduced stably into cell lines.

[0066] DNA encoding a polypeptide also may have a number of uses for the diagnosis of diseases, including breast cancer, resulting from aberrant expression of a target gene described herein. For example, the nucleic acid sequence may be used in hybridization assays of biopsies or autopsies to diagnose abnormalities of expression or function (e.g., Southern or Northern blot analysis, in situ hybridization assays).

[0067] In addition, the expression of a polypeptide during embryonic development may also be determined using nucleic acid encoding the polypeptide. As addressed, infra, production of functionally impaired polypeptide can be the cause of various disease states, such as breast cancer. In situ hybridizations using polynucleotide probes may be employed to predict problems related to breast cancer. Further, as indicated, infra, administration of human active polypeptide, recombinantly produced as described herein, may be used to treat disease states related to functionally impaired polypeptide. Alternatively, gene therapy approaches may be employed to remedy deficiencies of functional polypeptide or to replace or compete with dysfunctional polypeptide.

[0068] Expression Vectors. Host Cells, and Genetically Engineered Cells

[0069] Provided herein are nucleic acid vectors, often expression vectors, which contain a ICAM, MAPK10, KIAA0861, NUMA1, GALE, DPF3 or LOC145197 nucleic acid. As used herein, the term “vector” refers to a nucleic acid molecule capable of transporting another nucleic acid to which it has been linked and can include a plasmid, cosmid, or viral vector. The vector can be capable of autonomous replication or it can integrate into a host DNA. Viral vectors may include replication defective retroviruses, adenoviruses and adeno-associated viruses for example.

[0070] A vector can include a ICAM, MAPK10, KIAA0861, NUMA1, GALE, DPF3 or LOC145197 nucleic acid in a form suitable for expression of the nucleic acid in a host cell. The recombinant expression vector typically includes one or more regulatory sequences operatively linked to the nucleic acid sequence to be expressed. The term “regulatory sequence” includes promoters, enhancers and other expression control elements (e.g., polyadenylation signals). Regulatory sequences include those that direct constitutive expression of a nucleotide sequence, as well as tissue-specific regulatory and/or inducible sequences. The design of the expression vector can depend on such factors as the choice of the host cell to be transformed, the level of expression of polypeptide desired, and the like. Expression vectors can be introduced into host cells to produce ICAM, MAPK10, KIAA0861, NUMA1, GALE, DPF3 or LOC145197 polypeptides, including fusion polypeptides, encoded by ICAM, MAPK10, KIAA0861, NUMA1, GALE, DPF3 or LOC145197 nucleic acids.

[0071] Recombinant expression vectors can be designed for expression of ICAM, MAPK10, KIAA0861, NUMA1, GALE, DPF3 or LOC145197 polypeptides in prokaryotic or eukaryotic cells. For example, ICAM, MAPK10, KIAA0861, NUMA1, GALE, DPF3 or LOC145197 polypeptides can be expressed in E. coli, insect cells (e.g., using baculovirus expression vectors), yeast cells, or mammalian cells. Suitable host cells are discussed further in Goeddel, Gene Expression Technology: Methods in Enzymology 185, Academic Press, San Diego, Calif. (1990). Alternatively, the recombinant expression vector can be transcribed and translated in vitro, for example using T7 promoter regulatory sequences and T7 polymerase.

[0072] Expression of polypeptides in prokaryotes is most often carried out in E. coli with vectors containing constitutive or inducible promoters directing the expression of either fusion or non-fusion polypeptides. Fusion vectors add a number of amino acids to a polypeptide encoded therein, usually to the amino terminus of the recombinant polypeptide. Such fusion vectors typically serve three purposes: 1) to increase expression of recombinant polypeptide; 2) to increase the solubility of the recombinant polypeptide; and 3) to aid in the purification of the recombinant polypeptide by acting as a ligand in affinity purification. Often, a proteolytic cleavage site is introduced at the junction of the fusion moiety and the recombinant polypeptide to enable separation of the recombinant polypeptide from the fusion moiety subsequent to purification of the fusion polypeptide. Such enzymes, and their cognate recognition sequences, include Factor Xa, thrombin and enterokinase. Typical fusion expression vectors include pGEX (Pharmacia Biotech Inc; Smith & Johnson, Gene 67: 3140 (1988)), pMAL (New England Biolabs, Beverly, Mass.) and pRIT5 (Pharmacia, Piscataway, N.J.) which fuse glutathione S-transferase (GST), maltose E binding polypeptide, or polypeptide A, respectively, to the target recombinant polypeptide.

[0073] Purified fusion polypeptides can be used in screening assays and to generate antibodies specific for ICAM, MAPK10, KIAA0861, NUMA1, GALE, DPF3 or LOC145197 polypeptides. In a therapeutic embodiment, fusion polypeptide expressed in a retroviral expression vector is used to infect bone marrow cells that are subsequently transplanted into irradiated recipients. The pathology of the subject recipient is then examined after sufficient time has passed (e.g., six (6) weeks).

[0074] Expressing the polypeptide in host bacteria with an impaired capacity to proteolytically cleave the recombinant polypeptide is often used to maximize recombinant polypeptide expression (Gottesman, S., Gene Expression Technology: Methods in Enzymology, Academic Press, San Diego, Calif. 185: 119-128 (1990)). Another strategy is to alter the nucleotide sequence of the nucleic acid to be inserted into an expression vector so that the individual codons for each amino acid are those preferentially utilized in E. coli (Wada et al., Nucleic Acids Res. 20: 2111-2118 (1992)). Such alteration of nucleotide sequences can be carried out by standard DNA synthesis techniques.

[0075] When used in mammalian cells, the expression vector's control functions are often provided by viral regulatory elements. For example, commonly used promoters are derived from polyoma, Adenovirus 2, cytomegalovirus and Simian Virus 40. Recombinant mammalian expression vectors are often capable of directing expression of the nucleic acid in a particular cell type (e.g., tissue-specific regulatory elements are used to express the nucleic acid). Non-limiting examples of suitable tissue-specific promoters include an albumin promoter (liver-specific; Pinkert et al., Genes Dev. 1: 268-277 (1987)), lymphoid-specific promoters (Calame & Eaton, Adv. Immunol. 43: 235-275 (1988)), promoters of T cell receptors (Winoto & Baltimore, EMBO J. 8: 729-733 (1989)) promoters of immunoglobulins (Banerji et al., Cell 33: 729-740 (1983); Queen & Baltimore, Cell 33: 741-748 (1983)), neuron-specific promoters (e.g., the neurofilament promoter; Byrne & Ruddle, Proc. Natl. Acad. Sci. USA 86: 5473-5477 (1989)), pancreas-specific promoters (Edlund et al., Science 230: 912-916 (1985)), and mammary gland-specific promoters (e.g., milk whey promoter; U.S. Pat. No. 4,873,316 and European Application Publication No. 264,166). Developmentally-regulated promoters are sometimes utilized, for example, the murine hox promoters (Kessel & Gruss, Science 249: 374-379 (1990)) and the a-fetopolypeptide promoter (Campes & Tilghman, Genes Dev. 3: 537-546 (1989)).

[0076] A ICAM, MAPK10, KIAA0861, NUMA1, GALE, DPF3 or LOC145197 nucleic acid may also be cloned into an expression vector in an antisense orientation. Regulatory sequences (e.g., viral promoters and/or enhancers) operatively linked to a ICAM, MAPK10, KIAA0861, NUMA1, GALE, DPF3 or LOC145197 nucleic acid cloned in the antisense orientation can be chosen for directing constitutive, tissue specific or cell type specific expression of antisense RNA in a variety of cell types. Antisense expression vectors can be in the form of a recombinant plasmid, phagemid or attenuated virus. For a discussion of the regulation of gene expression using antisense genes see Weintraub et al., Antisense RNA as a molecular tool for genetic analysis, Reviews—Trends in Genetics, Vol. 1(1) (1986).

[0077] Also provided herein are host cells that include a ICAM, MAPK10, KIAA0861, NUMA1, GALE, DPF3 or LOC145197 nucleic acid within a recombinant expression vector or ICAM, MAPK10, KIAA0861, NUMA1, GALE, DPF3 or LOC145197 nucleic acid sequence fragments which allow it to homologously recombine into a specific site of the host cell genome. The terms “host cell” and “recombinant host cell” are used interchangeably herein. Such terms refer not only to the particular subject cell but rather also to the progeny or potential progeny of such a cell. Because certain modifications may occur in succeeding generations due to either mutation or environmental influences, such progeny may not, in fact, be identical to the parent cell, but are still included within the scope of the term as used herein. A host cell can be any prokaryotic or eukaryotic cell. For example, a ICAM, MAPK10, KIAA0861, NUMA1, GALE, DPF3 or LOC145197 polypeptide can be expressed in bacterial cells such as E. coli, insect cells, yeast or mammalian cells (such as Chinese hamster ovary cells (CHO) or COS cells). Other suitable host cells are known to those skilled in the art.

[0078] Vectors can be introduced into host cells via conventional transformation or transfection techniques. As used herein, the terms “transformation” and “transfection” are intended to refer to a variety of art-recognized techniques for introducing foreign nucleic acid (e.g., DNA) into a host cell, including calcium phosphate or calcium chloride co-precipitation, transduction/infection, DEAE-dextran-mediated transfection, lipofection, or electroporation.

[0079] A host cell provided herein can be used to produce (i.e., express) a ICAM, MAPK10, KIAA0861, NUMA1, GALE, DPF3 or LOC145197 polypeptide. Accordingly, further provided are methods for producing a ICAM, MAPK10, KIAA0861, NUMA1, GALE, DPF3 or LOC145197 polypeptide using the host cells described herein. In one embodiment, the method includes culturing host cells into which a recombinant expression vector encoding a ICAM, MAPK10, KIAA0861, NUMA1, GALE, DPF3 or LOC145197 polypeptide has been introduced in a suitable medium such that a ICAM, MAPK10, KIAA0861, NUMA1, GALE, DPF3 or LOC145197 polypeptide is produced. In another embodiment, the method further includes isolating a ICAM, MAPK10, KIAA0861, NUMA1, GALE, DPF3 or LOC145197 polypeptide from the medium or the host cell.

[0080] Also provided are cells or purified preparations of cells which include a ICAM, MAPK10, KIAA0861, NUMA1, GALE, DPF3 or LOC145197 transgene, or which otherwise misexpress ICAM, MAPK10, KIAA0861, NUMA1, GALE, DPF3 or LOC145197 polypeptide. Cell preparations can consist of human or non-human cells, e.g., rodent cells, e.g., mouse or rat cells, rabbit cells, or pig cells. In certain embodiments, the cell or cells include a ICAM, MAPK10, KIAA0861, NUMA1, GALE, DPF3 or LOC145197 transgene (e.g., a heterologous form of a ICAM, MAPK10, KIAA0861, NUMA1, GALE, DPF3 or LOC145197 such as a human gene expressed in non-human cells). The ICAM, MAPK10, KIAA0861, NUMA1, GALE, DPF3 or LOC145197 transgene can be misexpressed, e.g., overexpressed or underexpressed. In other embodiments, the cell or cells include a gene which misexpress an endogenous ICAM, MAPK10, KIAA0861, NUMA1, GALE, DPF3 or LOC145197 polypeptide (e.g., expression of a gene is disrupted, also known as a knockout). Such cells can serve as a model for studying disorders which are related to mutated or mis-expressed ICAM, MAPK10, KIAA0861, NUMA1, GALE, DPF3 or LOC145197 alleles or for use in drug screening. Also provided are human cells (e.g., a hematopoietic stem cells) transformed with a ICAM, MAPK10, KIAA0861, NUMA1, GALE, DPF3 or LOC145197 nucleic acid.

[0081] Also provided are cells or a purified preparation thereof (e.g., human cells) in which an endogenous ICAM, MAPK10, KIAA0861, NUMA1, GALE, DPF3 or LOC145197 nucleic acid is under the control of a regulatory sequence that does not normally control the expression of the endogenous ICAM, MAPK10, KIAA0861, NUMA1, GALE, DPF3 or LOC145197 gene. The expression characteristics of an endogenous gene within a cell (e.g., a cell line or microorganism) can be modified by inserting a heterologous DNA regulatory element into the genome of the cell such that the inserted regulatory element is operably linked to the endogenous ICAM, MAPK10, KIAA0861, NUMA1, GALE, DPF3 or LOC145197 gene. For example, an endogenous ICAM, MAPK10, KIAA0861, NUMA1, GALE, DPF3 or LOC145197 gene (e.g., a gene which is “transcriptionally silent,” not normally expressed, or expressed only at very low levels) may be activated by inserting a regulatory element which is capable of promoting the expression of a normally expressed gene product in that cell. Techniques such as targeted homologous recombinations, can be used to insert the heterologous DNA as described in, e.g., Chappel, U.S. Pat. No. 5,272,071; WO 91/06667, published on May 16, 1991.

Transgenic Animals

[0082] Non-human transgenic animals that express a heterologous ICAM, MAPK10, KIAA0861, NUMA1, GALE, DPF3 or LOC145197 polypeptide (e.g., expressed from a ICAM, MAPK10, KIAA0861, NUMA1, GALE, DPF3 or LOC145197 nucleic acid isolated from another organism) can be generated. Such animals are useful for studying the function and/or activity of a ICAM, MAPK10, KIAA0861, NUMA1, GALE, DPF3 or LOC145197 polypeptide and for identifying and/or evaluating modulators of ICAM, MAPK10, KIAA0861, NUMA1, GALE, DPF3 or LOC145197 nucleic acid and ICAM, MAPK10, KIAA0861, NUMA1, GALE, DPF3 or LOC145197 polypeptide activity. As used herein, a “transgenic animal” is a non-human animal such as a mammal (e.g., a non-human primate such as chimpanzee, baboon, or macaque; an ungulate such as an equine, bovine, or caprine; or a rodent such as a rat, a mouse, or an Israeli sand rat), a bird (e.g., a chicken or a turkey), an amphibian (e.g., a frog, salamander, or newt), or an insect (e.g., Drosophila melanogaster), in which one or more of the cells of the animal includes a ICAM, MAPK10, KIAA0861, NUMA1, GALE, DPF3 or LOC145197 transgene. A transgene is exogenous DNA or a rearrangement (e.g., a deletion of endogenous chromosomal DNA) that is often integrated into or occurs in the genome of cells in a transgenic animal. A transgene can direct expression of an encoded gene product in one or more cell types or tissues of the transgenic animal, and other transgenes can reduce expression (e.g., a knockout). Thus, a transgenic animal can be one in which an endogenous ICAM, MAPK10, KIAA0861, NUMA1, GALE, DPF3 or LOC145197 gene has been altered by homologous recombination between the endogenous gene and an exogenous DNA molecule introduced into a cell of the animal (e.g., an embryonic cell of the animal) prior to development of the animal.

[0083] Intronic sequences and polyadenylation signals can also be included in the transgene to increase expression efficiency of the transgene. One or more tissue-specific regulatory sequences can be operably linked to a ICAM, MAPK10, KIAA0861, NUMA1, GALE, DPF3 or LOC145197 transgene to direct expression of a ICAM, MAPK10, KIAA0861, NUMA1, GALE, DPF3 or LOC145197 polypeptide to particular cells. A transgenic founder animal can be identified based upon the presence of a ICAM, MAPK10, KIAA0861, NUMA1, GALE, DPF3 or LOC145197 transgene in its genome and/or expression of ICAM, MAPK10, KIAA0861, NUMA1, GALE, DPF3 or LOC145197 mRNA in tissues or cells of the animals. A transgenic founder animal can then be used to breed additional animals carrying the transgene. Moreover, transgenic animals carrying a transgene encoding a ICAM, MAPK10, KIAA0861, NUMA1, GALE, DPF3 or LOC145197 polypeptide can further be bred to other transgenic animals carrying other transgenes.

[0084] ICAM, MAPK10, KIAA0861, NUMA1, GALE, DPF3 or LOC145197 polypeptides can be expressed in transgenic animals or plants by introducing, for example, a nucleic acid encoding the polypeptide into the genome of an animal. In certain embodiments the nucleic acid is placed under the control of a tissue specific promoter, e.g., a milk or egg specific promoter, and recovered from the milk or eggs produced by the animal. Also included is a population of cells from a transgenic animal.

[0085] ICAM, MAPK10, KIAA0861, NUMA1, GALE, DPF3 and LOC145197 Polypeptides

[0086] Featured herein are isolated ICAM, MAPK10, KIAA0861, NUMA1, GALE, DPF3 or LOC145197 polypeptides, which include polypeptides having amino acid sequences set forth in SEQ ID NO: 18-27, and substantially identical polypeptides thereof. Such polypeptides sometimes are proteins or peptides. A ICAM, MAPK10, KIAA0861, NUMA1, GALE, DPF3 or LOC145197 polypeptide is a polypeptide encoded by a ICAM, MAPK10, KIAA0861, NUMA1, GALE, DPF3 or LOC145197 nucleic acid, where one nucleic acid can encode one or more different polypeptides. An “isolated” or “purified” polypeptide or protein is substantially free of cellular material or other contaminating proteins from the cell or tissue source from which the protein is derived, or substantially free from chemical precursors or other chemicals when chemically synthesized. In one embodiment, the language “substantially free” means preparation of a ICAM, MAPK10, KIAA0861, NUMA1, GALE, DPF3 or LOC145197 polypeptide or ICAM, MAPK10, KIAA0861, NUMA1, GALE, DPF3 or LOC145197 polypeptide variant having less than about 30%, 20%, 10% and sometimes 5% (by dry weight), of non-ICAM, MAPK10, KIAA0861, NUMA1, GALE, DPF3 or LOC145197 polypeptide (also referred to herein as a “contaminating protein”), or of chemical precursors or non-ICAM, MAPK10, KIAA0861, NUMA1, GALE, DPF3 or LOC145197 chemicals. When the ICAM, MAPK10, KIAA0861, NUMA1, GALE, DPF3 or LOC145197 polypeptide or a biologically active portion thereof is recombinantly produced, it is also often substantially free of culture medium, specifically, where culture medium represents less than about 20%, sometimes less than about 10%, and often less than about 5% of the volume of the polypeptide preparation. Isolated or purified ICAM, MAPK10, KIAA0861, NUMA1, GALE, DPF3 or LOC145197 polypeptide preparations are sometimes 0.01 milligrams or more or 0.1 milligrams or more, and often 1.0 milligrams or more and 10 milligrams or more in dry weight. In specific embodiments, a polypeptide comprises leucine at amino acid position 359 in SEQ ID NO: 23, a leucine at amino acid position 378 in SEQ ID NO: 23, an alanine at amino acid position 857 in SEQ ID NO: 23, an alanine at position 902 in SEQ ID NO: 23 a proline at amino acid position 352 in SEQ ID NO: 20 and/or an alanine at amino acid position 348 in SEQ ID NO: 20. A polypeptide encoded by a nucleotide sequence in a NUMA1 region (e.g., NUMA1 polypeptide (e.g., SEQ ID NO: 24), FLJ20625 polypeptide (e.g., accession no. NM_{—}0L7907) and IL18BP polypeptide (e.g., accession nos. NM_{—}173042, NM_{—}173043 or NM_{—}173044)) sometimes includes one or more of the following amino acid variations: a leucine at a position corresponding to amino acid position 73 in an NM_{—}017907 polypeptide, a glutamine at a position corresponding to amino acid position 772 in SEQ ID NO: 24, a glutamate at a position corresponding to amino acid position 873 in SEQ ID NO: 24, a glycine at a position corresponding to amino acid position 794 in SEQ ID NO: 24, an arginine at a position corresponding to amino acid position 89 in an IL18BP polypeptide, an argenine at a position corresponding to amino acid position 119 in an IL18BP polypeptide, a cysteine at a position corresponding to amino acid position 195 in a IL18BP polypeptide, an alanine at a position corresponding to amino acid position 2049 in SEQ ID NO: 24, a methionine at a position corresponding to amino acid position 1825 in SEQ ID NO: 24, and a glycine at a position corresponding to amino acid position 978 in SEQ ID NO: 24. A polypeptide encoded by a nucleotide sequence in a GALE region (e.g., GALE (e.g., SEQ ID NO: 25), TCEB3 (e.g., accession no. NM_{—}003198) and HT014 (e.g., accession no. NM_{—}020362)) sometimes includes one or more of the following amino acid variations: a valine at a position corresponding to amino acid position 298 in a TCEB3 polypeptide, a valine at a position corresponding to amino acid position 490 in a TCEB3 polypeptide, a methionine at a position corresponding to amino acid position 119 in a TCEB3 polypeptide, a glycine at a position corresponding to amino acid position 227 in SEQ ID NO: 25, an aspartate at a position corresponding to amino acid position 231 in SEQ ID NO: 25, an asparagine at a position corresponding to amino acid position 268 in SEQ ID NO: 25, a valine at a position corresponding to amino acid position 283 in SEQ ID NO: 25, a leucine at a position corresponding to amino acid position 215 in SEQ ID NO: 25, a glycine at a position corresponding to amino acid position 235 in SEQ ID NO: 25, a glutamate at a position corresponding to amino acid position 331 in SEQ ID NO: 25, a serine at a position corresponding to amino acid position 191 in a HT014 polypeptide and a tyrosine at a position corresponding to amino acid position 141 in SEQ ID NO: 25.

[0087] In another aspect, featured herein are ICAM, MAPK10, KIAA0861, NUMA1, GALE, DPF3 or LOC145197 polypeptides and biologically active or antigenic fragments thereof that are useful as reagents or targets in assays applicable to prevention, treatment or diagnosis of breast cancer. In another embodiment, provided herein are ICAM, MAPK10, KIAA0861, NUMA1, GALE, DPF3 or LOC145197 polypeptides having a ICAM, MAPK10, KIAA0861, NUMA1, GALE, DPF3 or LOC145197 activity or activities.

[0088] Further included herein are ICAM, MAPK10, KIAA0861, NUMA1, GALE, DPF3 or LOC145197 polypeptide fragments. The polypeptide fragment may be a domain or part of a domain of a ICAM, MAPK10, KIAA0861, NUMA1, GALE, DPF3 or LOC145197 polypeptide. The polypeptide fragment is often 50 or fewer, 100 or fewer, or 200 or fewer amino acids in length, and is sometimes 300, 400, 500, 600, 700, or 900 or fewer amino acids in length. In certain embodiments, the polypeptide fragment comprises, consists essentially of, or consists of, at least 6 consecutive amino acids and not more than ¹²¹I consecutive amino acids of SEQ ID NO: 18-27, or the polypeptide fragment comprises, consists essentially of, or consists of, at least 6 consecutive amino acids and not more than 543 consecutive amino acids of SEQ ID NO: 18-27.

[0089] ICAM, MAPK10, KIAA0861, NUMA1, GALE, DPF3 or LOC145197 polypeptides described herein can be used as immunogens to produce anti-ICAM, MAPK10, KIAA0861, NUMA1, GALE, DPF3 or LOC145197 antibodies in a subject, to purify ICAM, MAPK10, KIAA0861, NUMA1, GALE, DPF3 or LOC145197 ligands or binding partners, and in screening assays to identify molecules which inhibit or enhance the interaction of ICAM, MAPK10, KIAA0861, NUMA1, GALE, DPF3 or LOC145197 with a ICAM, MAPK10, KIAA0861, NUMA1, GALE, DPF3 or LOC145197 substrate. Full-length ICAM, MAPK10, KIAA0861, NUMA1, GALE, DPF3 or LOC145197 polypeptides and polynucleotides encoding the same may be specifically substituted for a ICAM, MAPK10, KIAA0861, NUMA1, GALE, DPF3 or LOC145197 polypeptide fragment or polynucleotide encoding the same in any embodiment described herein.

[0090] Substantially identical polypeptides may depart from the amino acid sequences set forth in SEQ ID NO: 18-27 in different manners. For example, conservative amino acid modifications may be introduced at one or more positions in the amino acid sequences of SEQ ID NO: 18-27. A “conservative amino acid substitution” is one in which the amino acid is replaced by another amino acid having a similar structure and/or chemical function. Families of amino acid residues having similar structures and functions are well known. These families include amino acids with basic side chains (e.g., lysine, arginine, histidine), acidic side chains (e.g., aspartic acid, glutamic acid), uncharged polar side chains (e.g., glycine, asparagine, glutamine, serine, threonine, tyrosine, cysteine), nonpolar side chains (e.g., alanine, valine, leucine, isoleucine, proline, phenylalanine, methionine, tryptophan), beta-branched side chains (e.g., threonine, valine, isoleucine) and aromatic side chains (e.g., tyrosine, phenylalanine, tryptophan, histidine). Also, essential and non-essential amino acids may be replaced. A “non-essential” amino acid is one that can be altered without abolishing or substantially altering the biological function of a ICAM, MAPK10, KIAA0861, NUMA1, GALE, DPF3 or LOC145197 polypeptide, whereas altering an “essential” amino acid abolishes or substantially alters the biological function of a ICAM, MAPK10, KIAA0861, NUMA1, GALE, DPF3 or LOC145197 polypeptide. Amino acids that are conserved among ICAM, MAPK10, KIAA0861, NUMA1, GALE, DPF3 or LOC145197 polypeptides are typically essential amino acids.

[0091] Also, ICAM, MAPK10, KIAA0861, NUMA1, GALE, DPF3 or LOC145197 polypeptides and polypeptide variants may exist as chimeric or fusion polypeptides. As used herein, a ICAM, MAPK10, KIAA0861, NUMA1, GALE, DPF3 or LOC145197 “chimeric polypeptide” or “fusion polypeptide” includes a ICAM, MAPK10, KIAA0861, NUMA1, GALE, DPF3 or LOC145197 polypeptide linked to a non-ICAM, MAPK10, KIAA0861, NUMA1, GALE, DPF3 or LOC145197 polypeptide. A “non-ICAM, MAPK10, KIAA0861, NUMA1, GALE, DPF3 or LOC145197 polypeptide” refers to a polypeptide having an amino acid sequence corresponding to a polypeptide which is not substantially identical to the ICAM, MAPK10, KIAA0861, NUMA1, GALE, DPF3 or LOC145197 polypeptide, which includes, for example, a polypeptide that is different from the ICAM, MAPK10, KIAA0861, NUMA1, GALE, DPF3 or LOC145197 polypeptide and derived from the same or a different organism. The ICAM, MAPK10, KIAA0861, NUMA1, GALE, DPF3 or LOC145197 polypeptide in the fusion polypeptide can correspond to an entire or nearly entire ICAM, MAPK10, KIAA0861, NUMA1, GALE, DPF3 or LOC145197 polypeptide or a fragment thereof. The non-ICAM, MAPK10, KIAA0861, NUMA1, GALE, DPF3 or LOC145197 polypeptide can be fused to the N-terminus or C-terminus of the ICAM, MAPK10, KIAA0861, NUMA1, GALE, DPF3 or LOC145197 polypeptide.

[0092] Fusion polypeptides can include a moiety having high affinity for a ligand. For example, the fusion polypeptide can be a GST-ICAM, MAPK10, KIAA0861, NUMA1, GALE, DPF3 or LOC145197 fusion polypeptide in which the ICAM, MAPK10, KIAA0861, NUMA1, GALE, DPF3 or LOC145197 sequences are fused to the C-terminus of the GST sequences, or a polyhistidine-ICAM, MAPK10, KIAA0861, NUMA1, GALE, DPF3 or LOC145197 fusion polypeptide in which the ICAM, MAPK10, KIAA0861, NUMA1, GALE, DPF3 or LOC145197 polypeptide is fused at the N- or C-terminus to a string of histidine residues. Such fusion polypeptides can facilitate purification of recombinant ICAM, MAPK10, KIAA0861, NUMA1, GALE, DPF3 or LOC145197. Expression vectors are commercially available that already encode a fusion moiety (e.g., a GST polypeptide), and a ICAM, MAPK10, KIAA0861, NUMA1, GALE, DPF3 or LOC145197 nucleic acid can be cloned into an expression vector such that the fusion moiety is linked in-frame to the ICAM, MAPK10, KIAA0861, NUMA1, GALE, DPF3 or LOC145197 polypeptide. Further, the fusion polypeptide can be a ICAM, MAPK10, KIAA0861, NUMA1, GALE, DPF3 or LOC145197 polypeptide containing a heterologous signal sequence at its N-terminus. In certain host cells (e.g., mammalian host cells), expression, secretion, cellular internalization, and cellular localization of a ICAM, MAPK10, KIAA0861, NUMA1, GALE, DPF3 or LOC145197 polypeptide can be increased through use of a heterologous signal sequence. Fusion polypeptides can also include all or a part of a serum polypeptide (e.g., an IgG constant region or human serum albumin).

[0093] ICAM, MAPK10, KIAA0861, NUMA1, GALE, DPF3 or LOC145197polypeptides or fragments thereof can be incorporated into pharmaceutical compositions and administered to a subject in vivo. Administration of these ICAM, MAPK10, KIAA0861, NUMA1, GALE, DPF3 or LOC145197 polypeptides can be used to affect the bioavailability of a ICAM, MAPK10, KIAA0861, NUMA1, GALE, DPF3 or LOC145197 substrate and may effectively increase or decrease ICAM, MAPK10, KIAA0861, NUMA1, GALE, DPF3 or LOC145197 biological activity in a cell or effectively supplement dysfunctional or hyperactive ICAM, MAPK10, KIAA0861, NUMA1, GALE, DPF3 or LOC145197 polypeptide. ICAM, MAPK10, KIAA0861, NUMA1, GALE, DPF3 or LOC145197 fusion polypeptides may be useful therapeutically for the treatment of disorders caused by, for example, (i) aberrant modification or mutation of a gene encoding a ICAM, MAPK10, KIAA0861, NUMA1, GALE, DPF3 or LOC145197 polypeptide; (ii) mis-regulation of the ICAM, MAPK10, KIAA0861, NUMA1, GALE, DPF3 or LOC145197 gene; and (iii) aberrant post-translational modification of a ICAM, MAPK10, KIAA0861, NUMA1, GALE, DPF3 or LOC145197 polypeptide. Also, ICAM, MAPK10, KIAA0861, NUMA1, GALE, DPF3 or LOC145197 polypeptides can be used as immunogens to produce anti-ICAM, MAPK10, KIAA0861, NUMA1, GALE, DPF3 or LOC145197 antibodies in a subject, to purify ICAM, MAPK10, KIAA0861, NUMA1, GALE, DPF3 or LOC145197 ligands or binding partners, and in screening assays to identify molecules which inhibit or enhance the interaction of ICAM, MAPK10, KIAA0861, NUMA1, GALE, DPF3 or LOC145197 with a ICAM, MAPK10, KIAA0861, NUMA1, GALE, DPF3 or LOC145197 substrate.

[0094] In addition, polypeptides can be chemically synthesized using techniques known in the art (See, e.g., Creighton, 1983 Proteins. New York, N.Y.: W.H. Freeman and Company; and Hunkapiller et al., (1984) Nature July 12-18; 310(5973): 105-11). For example, a relative short polypeptide fragment can be synthesized by use of a peptide synthesizer. Furthermore, if desired, non-classical amino acids or chemical amino acid analogs can be introduced as a substitution or addition into the fragment sequence. Non-classical amino acids include, but are not limited to, to the D-isomers of the common amino acids, 2,4-diaminobutyric acid, a-amino isobutyric acid, 4-aminobutyric acid, Abu, 2-amino butyric acid, g-Abu, e-Ahx, 6-amino hexanoic acid, Aib, 2-amino isobutyric acid, 3-amino propionic acid, ornithine, norleucine, norvaline, hydroxyproline, sarcosine, citrulline, homocitrulline, cysteic acid, t-butylglycine, t-butylalanine, phenylglycine, cyclohexylalanine, b-alanine, fluoroamino acids, designer amino acids such as b-methyl amino acids, Ca-methyl amino acids, Na-methyl amino acids, and amino acid analogs in general. Furthermore, the amino acid can be D (dextrorotary) or L (levorotary).

[0095] Also included are polypeptide fragments which are differentially modified during or after translation, e.g., by glycosylation, acetylation, phosphorylation, amidation, derivatization by known protecting/blocking groups, proteolytic cleavage, linkage to an antibody molecule or other cellular ligand, and the like. Any of numerous chemical modifications may be carried out by known techniques, including but not limited, to specific chemical cleavage by cyanogen bromide, trypsin, chymotrypsin, papain, V8 protease, NaBH₄; acetylation, formylation, oxidation, reduction; metabolic synthesis in the presence of tunicamycin; and the like.

[0096] Additional post-translational modifications include, for example, N-linked or O-linked carbohydrate chains, processing of N-terminal or C-terminal ends), attachment of chemical moieties to the amino acid backbone, chemical modifications of N-linked or O-linked carbohydrate chains, and addition or deletion of an N-terminal methionine residue as a result of prokaryotic host cell expression. The polypeptide fragments may also be modified with a detectable label, such as an enzymatic, fluorescent, isotopic or affinity label to allow for detection and isolation of the polypeptide.

[0097] Also provided are chemically modified polypeptide derivatives that may provide additional advantages such as increased solubility, stability and circulating time of the polypeptide, or decreased immunogenicity. See U.S. Pat. No. 4,179,337. The chemical moieties for derivitization may be selected from water soluble polymers such as polyethylene glycol, ethylene glycol/propylene glycol copolymers, carboxymethylcellulose, dextran, polyvinyl alcohol and the like. The polypeptides may be modified at random positions within the molecule, or at predetermined positions within the molecule and may include one, two, three or more attached chemical moieties.

[0098] The polymer may be of any molecular weight, and may be branched or unbranched. For polyethylene glycol, the molecular weight is between about 1 kDa and about 100 kDa (the term “about” indicating that in preparations of polyethylene glycol, some molecules will weigh more, some less, than the stated molecular weight) for ease in handling and manufacturing. Other sizes may be used, depending on the desired therapeutic profile (e.g., the duration of sustained release desired, the effects, if any on biological activity, the ease in handling, the degree or lack of antigenicity and other known effects of the polyethylene glycol to a therapeutic protein or analog).

[0099] The polyethylene glycol molecules (or other chemical moieties) should be attached to the polypeptide with consideration of effects on functional or antigenic domains of the polypeptide. There are a number of attachment methods available to those skilled in the art, e.g., EP 0 401 384, herein incorporated by reference (coupling PEG to G-CSF), see also Malik et al. (1992) Exp Hematol. September; 20 (8): 1028-35, reporting pegylation of GM-CSF using tresyl chloride). For example, polyethylene glycol may be covalently bound through amino acid residues via a reactive group, such as, a free amino or carboxyl group. Reactive groups are those to which an activated polyethylene glycol molecule may be bound. The amino acid residues having a free amino group may include lysine residues and the N-terminal amino acid residues; those having a free carboxyl group may include aspartic acid residues, glutamic acid residues and the C-terminal amino acid residue. Sulfhydryl groups may also be used as a reactive group for attaching the polyethylene glycol molecules. A polymer sometimes is attached at an amino group, such as attachment at the N-terminus or lysine group.

[0100] One may specifically desire proteins chemically modified at the N-terminus. Using polyethylene glycol as an illustration of the present composition, one may select from a variety of polyethylene glycol molecules (by molecular weight, branching, and the like), the proportion of polyethylene glycol molecules to protein (polypeptide) molecules in the reaction mix, the type of pegylation reaction to be performed, and the method of obtaining the selected N-terminally pegylated protein. The method of obtaining the N-terminally pegylated preparation (i.e., separating this moiety from other monopegylated moieties if necessary) may be by purification of the N-terminally pegylated material from a population of pegylated protein molecules. Selective proteins chemically modified at the N-terminus may be accomplished by reductive alkylation, which exploits differential reactivity of different types of primary amino groups (lysine versus the N-terminal) available for derivatization in a particular protein. Under the appropriate reaction conditions, substantially selective derivatization of the protein at the N-terminus with a carbonyl group containing polymer is achieved.

[0101] Substantially Identical Nucleic Acids and Polypeptides

[0102] Nucleotide sequences and polypeptide sequences that are substantially identical to a ICAM, MAPK10, KIAA0861, NUMA1, GALE, DPF3 or LOC145197 nucleotide sequence and the ICAM, MAPK10, KIAA0861, NUMA1, GALE, DPF3 or LOC145197 polypeptide sequences encoded by those nucleotide sequences are included herein. The term “substantially identical” as used herein refers to two or more nucleic acids or polypeptides sharing one or more identical nucleotide sequences or polypeptide sequences, respectively. Included are nucleotide sequences or polypeptide sequences that are 55% or more, 60% or more, 65% or more, 70% or more, 75% or more, 80% or more, 85% or more, 90% or more, 95% or more (each often within a 1%, 2%, 3% or 4% variability) or more identical to the nucleotide sequences in SEQ ID NO: 1-17 or the encoded ICAM, MAPK10, KIAA0861, NUMA1, GALE, DPF3 or LOC145197 polypeptide amino acid sequences. One test for determining whether two nucleic acids are substantially identical is to determine the percent of identical nucleotide sequences or polypeptide sequences shared between the nucleic acids or polypeptides.

[0103] Calculations of sequence identity are often performed as follows. Sequences are aligned for optimal comparison purposes (e.g., gaps can be introduced in one or both of a first and a second amino acid or nucleic acid sequence for optimal alignment and non-homologous sequences can be disregarded for comparison purposes). The length of a reference sequence aligned for comparison purposes is sometimes 30% or more, 40% or more, 50% or more, often 60% or more, and more often 70% or more, 80% or more, 90% or more, 90% or more, or 100% of the length of the reference sequence. The nucleotides or amino acids at corresponding nucleotide or polypeptide positions, respectively, are then compared among the two sequences. When a position in the first sequence is occupied by the same nucleotide or amino acid as the corresponding position in the second sequence, the nucleotides or amino acids are deemed to be identical at that position. The percent identity between the two sequences is a function of the number of identical positions shared by the sequences, taking into account the number of gaps, and the length of each gap, introduced for optimal alignment of the two sequences.

[0104] Comparison of sequences and determination of percent identity between two sequences can be accomplished using a mathematical algorithm. Percent identity between two amino acid or nucleotide sequences can be determined using the algorithm of Meyers & Miller, CABIOS 4: 11-17 (1989), which has been incorporated into the ALIGN program (version 2.0), using a PAM120 weight residue table, a gap length penalty of 12 and a gap penalty of 4. Also, percent identity between two amino acid sequences can be determined using the Needleman & Wunsch, J. Mol. Biol. 48: 444-453 (1970) algorithm which has been incorporated into the GAP program in the GCG software package (available at the http address www.gcg.com), using either a Blossum 62 matrix or a PAM250 matrix, and a gap weight of 16, 14, 12, 10, 8, 6, or 4 and a length weight of 1, 2, 3, 4, 5, or 6. Percent identity between two nucleotide sequences can be determined using the GAP program in the GCG software package (available at http address www.gcg.com), using a NWSgapdna.CMP matrix and a gap weight of 40, 50, 60, 70, or 80 and a length weight of 1, 2, 3, 4, 5, or 6. A set of parameters often used is a Blossum 62 scoring matrix with a gap open penalty of 12, a gap extend penalty of 4, and a frameshift gap penalty of 5.

[0105] Another manner for determining if two nucleic acids are substantially identical is to assess whether a polynucleotide homologous to one nucleic acid will hybridize to the other nucleic acid under stringent conditions. As use herein, the term “stringent conditions” refers to conditions for hybridization and washing. Stringent conditions are known to those skilled in the art and can be found in Current Protocols in Molecular Biology, John Wiley & Sons, N.Y., 6.3.1-6.3.6 (1989). Aqueous and non-aqueous methods are described in that reference and either can be used. An example of stringent hybridization conditions is hybridization in 6× sodium chloride/sodium citrate (SSC) at about 45° C., followed by one or more washes in 0.2×SSC, 0.1% SDS at 50° C. Another example of stringent hybridization conditions are hybridization in 6× sodium chloride/sodium citrate (SSC) at about 45° C., followed by one or more washes in 0.2×SSC, 0.1% SDS at 55° C. A further example of stringent hybridization conditions is hybridization in 6× sodium chloride/sodium citrate (SSC) at about 45° C., followed by one or more washes in 0.2×SSC, 0.1% SDS at 60° C. Often, stringent hybridization conditions are hybridization in 6× sodium chloride/sodium citrate (SSC) at about 45° C., followed by one or more washes in 0.2×SSC, 0.1% SDS at 65° C. More often, stringency conditions are 0.5M sodium phosphate, 7% SDS at 65° C., followed by one or more washes at 0.2×SSC, 1% SDS at 65° C.

[0106] An example of a substantially identical nucleotide sequence to a ICAM, MAPK10, KIAA0861, NUMA1, GALE, DPF3 or LOC145197 nucleotide sequence is one that has a different nucleotide sequence but still encodes the same polypeptide sequence encoded by the ICAM, MAPK10, KIAA0861, NUMA1, GALE, DPF3 or LOC145197 nucleotide sequence. Another example is a nucleotide sequence that encodes a polypeptide having a polypeptide sequence that is more than 70% or more identical to, sometimes 75% or more, 80% or more, or 85% or more identical to, and often 90% or more and 95% or more identical to a polypeptide sequence encoded by a ICAM, MAPK10, KIAA0861, NUMA1, GALE, DPF3 or LOC145197 nucleotide sequence.

[0107] ICAM, MAPK10, KIAA0861, NUMA1, GALE, DPF3 or LOC145197 nucleotide sequences and ICAM, MAPK10, KIAA0861, NUMA1, GALE, DPF3 or LOC145197 amino acid sequences can be used as “query sequences” to perform a search against public databases to identify other family members or related sequences, for example. Such searches can be performed using the NBLAST and XBLAST programs (version 2.0) of Altschul et al., J. Mol. Biol. 215: 403-10 (1990). BLAST nucleotide searches can be performed with the NBLAST program, score=100, wordlength=12 to obtain nucleotide sequences homologous to nucleotide sequences from SEQ ID NO: 1-17. BLAST polypeptide searches can be performed with the XBLAST program, score=50, wordlength=3 to obtain amino acid sequences homologous to polypeptides encoded by a ICAM, MAPK10, KIAA0861, NUMA1, GALE, DPF3 or LOC145197 nucleotide sequence. To obtain gapped alignments for comparison purposes, Gapped BLAST can be utilized as described in Altschul et al., Nucleic Acids Res. 25(17): 3389-3402 (1997). When utilizing BLAST and Gapped BLAST programs, default parameters of the respective programs (e.g., XBLAST and NBLAST) can be used (see the http address www.ncbi.nlm.nih.gov).

[0108] A nucleic acid that is substantially identical to a ICAM, MAPK10, KIAA0861, NUMA1, GALE, DPF3 or LOC145197 nucleotide sequence may include polymorphic sites at positions equivalent to those described herein when the sequences are aligned. For example, using the alignment procedures described herein, SNPs in a sequence substantially identical to a sequence in SEQ ID NO: 1-17 can be identified at nucleotide positions that match (i.e., align) with nucleotides at SNP positions in the nucleotide sequence of SEQ ID NO: 1-17. Also, where a polymorphic variation results in an insertion or deletion, insertion or deletion of a nucleotide sequence from a reference sequence can change the relative positions of other polymorphic sites in the nucleotide sequence.

[0109] Substantially identical nucleotide and polypeptide sequences include those that are naturally occurring, such as allelic variants (same locus), splice variants, homologs (different locus), and orthologs (different organism) or can be non-naturally occurring. Non-naturally occurring variants can be generated by mutagenesis techniques, including those applied to polynucleotides, cells, or organisms. The variants can contain nucleotide substitutions, deletions, inversions and insertions. Variation can occur in either or both the coding and non-coding regions. The variations can produce both conservative. and non-conservative amino acid substitutions (as compared in the encoded product). Orthologs, homologs, allelic variants, and splice variants can be identified using methods known in the art. These variants normally comprise a nucleotide sequence encoding a polypeptide that is 50% or more, about 55% or more, often about 70-75% or more, more often about 80-85% or more, and typically about 90-95% or more identical to the amino acid sequences of target polypeptides or a fragment thereof. Such nucleic acid molecules readily can be identified as being able to hybridize under stringent conditions to a nucleotide sequence in SEQ ID NO: 1-17 or a fragment thereof. Nucleic acid molecules corresponding to orthologs, homologs, and allelic variants of a nucleotide sequence in SEQ ID NO: 1-17 can be identified by mapping the sequence to the same chromosome or locus as the nucleotide sequence in SEQ ID NO: 1-17.

[0110] Also, substantially identical nucleotide sequences may include codons that are altered with respect to the naturally occurring sequence for enhancing expression of a target polypeptide in a particular expression system. For example, the nucleic acid can be one in which one or more codons are altered, and often 10% or more or 20% or more of the codons are altered for optimized expression in bacteria (e.g., E. coli), yeast (e.g., S. cervesiae), human (e.g., 293 cells), insect, or rodent (e.g., hamster) cells.

[0111] Methods for Identifying Subjects at Risk of Breast Cancer and Breast Cancer Risk in a Subject

[0112] Methods for prognosing and diagnosing breast cancer in subjects are provided herein. These methods include detecting the presence or absence of one or more polymorphic variations associated with breast cancer in a nucleotide sequence set forth in SEQ ID NO: 1-7, or substantially identical sequence thereof, in a sample from a subject, where the presence of a polymorphic variant is indicative of a risk of breast cancer.

[0113] Thus, featured herein is a method for detecting a subject at risk of breast cancer or the risk of breast cancer in a subject, which comprises detecting the presence or absence of a polymorphic variation associated with breast cancer at a polymorphic site in a nucleic acid sample from a subject, where the nucleotide sequence comprises a polynucleotide sequence selected from the group consisting of: (a) a nucleotide sequence set forth in SEQ ID NO: 1-7; (b) a nucleotide sequence which encodes a polypeptide having an amino acid sequence encoded by a nucleotide sequence in SEQ ID NO: 1-7; (c) a nucleotide sequence which encodes a polypeptide that is 90% or more identical to an amino acid sequence encoded by a nucleotide sequence in SEQ ID NO: 1-7 or a nucleotide sequence about 90% or more identical to the nucleotide sequence set forth in SEQ ID NO: 1-7; and (d) a fragment of a nucleotide sequence of (a), (b), or (c), often a fragment that includes a polymorphic site associated with breast cancer; whereby the presence of the polymorphic variation is indicative of a risk of breast cancer in the subject. In certain embodiments, the polymorphic variant is detected at a position described herein. The term “SEQ ID NO: 1-7” as used herein refers to one or more of SEQ ID NO: 1, 2, 3, 4, 5, 6 or 7.

[0114] In certain embodiments, determining the presence of a combination of two or more polymorphic variants associated with breast cancer in one or more genetic loci (e.g., one or more genes) of the sample is determined to identify, quantify and/or estimate, risk of breast cancer. The risk often is the probability of having or developing breast cancer. The risk sometimes is expressed as a relative risk with respect to a population average risk of breast cancer, and sometimes is expressed as a relative risk with resepect to the lowest risk group. Such relative risk assessments often are based upon penetrance values determined by statistical methods (see e.g., statistical analysis Example 9), and are particularly useful to clinicians and insurance companies for assessing risk of breast cancer (e.g., a clinician can target appropriate detection, prevention and therapeutic regimens to a partient after determining the patient's risk of breast cancer, and an insurance company can fine tune actuarial tables based upon population genotype assessments of breast cancer risk). Risk of breast cancer sometimes is expressed as an odds ratio, which is the odds of a particular person having a genotype has or will develop breast cancer with respect to another genotype group (e.g., the most disease protective genotype or population average). In related embodiments, the determination is utilized to identify a subject at risk of breast cancer. In an embodiment, two or more polymorphic variations are detected in two or more regions in human genomic DNA associated with increased risk of breast cancer, such as regions selected from the group of loci consisting of ICAM, MAPK10, KIAA0861, NUMA1, GALE, DPF3 and LOC145197, for example. In certain embodiments, 3 or more, or 4, 5, 6, 7, 8, 9, 10, 11, 12, 13, 14, 15, 16, 17, 18, 19 or 20 or more polymorphic variants are detected in the sample. In specific embodiments, polymorphic variants are detected in ICAM, MAPK10, KIAA0861, NUMA1, GALE, DPF3 and LOC145197 loci, such as at positions 44247 in SEQ ID NO: 1 (ICAM), position 36424 in SEQ ID NO: 2 (MAPK10), position 48563 in SEQ ID NO: 3 (KIAA0861), position 49002 in SEQ ID NO: 4 (NUMA1) and position 174 in SEQ ID NO: 5 (GALE), for example. In certain embodiments, polymorphic variants are detected at other genetic loci (e.g., the polymorphic variants can be detected in ICAM, MAPK10, KIAA0861, NUMA1, GALE, DPF3 and/or LOC145197 in addition to other loci or only in other loci), where the other loci include but are not limited to RAD21, KLF12, SPUVE, GRIN3A, PFTK1, SERPINA5, LOC115209, HRMT1L3, DLG1, KIAA0783, DPF3, CENPC1, GP6, LAMA4, CHCB/C20ORF154, LOC338749, and TTN/LOC351327, which are described in patent applications Nos. 10/723,670, 10/723,518, 10/722,939 and 10/723,683, having attorney docket numbers524592006700, 524592006800, 524592007100 and 524592007200, respectively, and any others disclosed in patent application Nos. 60/429,136 (filed Nov. 25, 2002) and 60/490,234 (filed Jul. 24, 2003).

[0115] A risk of developing aggressive forms of breast cancer likely to metastasize or invade surrounding tissues (e.g., Stage IIIA, IIIB, and IV breast cancers), and subjects at risk of developing aggressive forms of breast cancer also may be identified by the methods described herein. These methods include collecting phenotype information from subjects having breast cancer, which includes the stage of progression of the breast cancer, and performing a secondary phenotype analysis to detect the presence or absence of one or more polymorphic variations associated with a particular stage form of breast cancer. Thus, detecting the presence or absence of one or more polymorphic variations in a ICAM, MAPK10, KIAA0861, NUMA1, GALE, DPF3 or LOC145197 nucleotide sequence associated with a late stage form of breast cancer often is prognostic and/or diagnostic of an aggressive form of the cancer.

[0116] Results from prognostic tests may be combined with other test results to diagnose breast cancer. For example, prognostic results may be gathered, a patient sample may be ordered based on a determined predisposition to breast cancer, the patient sample is analyzed, and the results of the analysis may be utilized to diagnose breast cancer. Also breast cancer diagnostic methods can be developed from studies used to generate prognostic/diagnostic methods in which populations are stratified into subpopulations having different progressions of breast cancer. In another embodiment, prognostic results may be gathered; a patient's risk factors for developing breast cancer analyzed (e.g., age, race, family history, age of first menstrual cycle, age at birth of first child); and a patient sample may be ordered based on a determined predisposition to breast cancer. In an alternative embodiment, the results from predisposition analyses described herein may be combined with other test results indicative of breast cancer, which were previously, concurrently, or subsequently gathered with respect to the predisposition testing. In these embodiments, the combination of the prognostic test results with other test results can be probative of breast cancer, and the combination can be utilized as a breast cancer diagnostic. The results of any test indicative of breast cancer known in the art may be combined with the methods described herein. Examples of such tests are mammography (e.g., a more frequent and/or earlier mammography regimen may be prescribed); breast biopsy and optionally a biopsy from another tissue; breast ultrasound and optionally an ultrasound analysis of another tissue; breast magnetic resonance imaging (MRI) and optionally an MRI analysis of another tissue; electrical impedance (T-scan) analysis of breast and optionally of another tissue; ductal lavage; nuclear medicine analysis (e.g., scintimammography); BRCA1 and/or BRCA2 sequence analysis results; and thermal imaging of the breast and optionally of another tissue. Testing may be performed on tissue other than breast to diagnose the occurrence of metastasis (e.g., testing of the lymph node).

[0117] Risk of breast cancer sometimes is expressed as a probability, such as an odds ratio, percentage, or risk factor. The risk is based upon the presence or absence of one or more polymorphic variants described herein, and also may be based in part upon phenotypic traits of the individual being tested. Methods for calculating predispositions based upon patient data are well known (see, e.g., Agresti, Categorical Data Analysis, 2nd Ed. 2002. Wiley). Allelotyping and genotyping analyses may be carried out in populations other than those exemplified herein to enhance the predictive power of the prognostic method. These further analyses are executed in view of the exemplified procedures described herein, and may be based upon the same polymorphic variations or additional polymorphic variations. Risk determinations for breast cancer are useful in a variety of applications. In one embodiment, breast cancer risk determinations are used by clinicians to direct appropriate detection, preventative and treatment procedures to subjects who most require these. In another embodiment, breast cancer risk determinations are used by health insurers for preparing actuarial tables and for calculating insurance premiums.

[0118] The nucleic acid sample typically is isolated from a biological sample obtained from a subject. For example, nucleic acid can be isolated from blood, saliva, sputum, urine, cell scrapings, and biopsy tissue. The nucleic acid sample can be isolated from a biological sample using standard techniques, such as the technique described in Example 2. As used herein, the term “subject” refers primarily to humans but also refers to other mammals such as dogs, cats, and ungulates (e.g., cattle, sheep, and swine). Subjects also include avians (e.g., chickens and turkeys), reptiles, and fish (e.g., salmon), as embodiments described herein can be adapted to nucleic acid samples isolated from any of these organisms. The nucleic acid sample may be isolated from the subject and then directly utilized in a method for determining the presence of a polymorphic variant, or alternatively, the sample may be isolated and then stored (e.g., frozen) for a period of time before being subjected to analysis.

[0119] The presence or absence of a polymorphic variant is determined using one or both chromosomal complements represented in the nucleic acid sample. Determining the presence or absence of a polymorphic variant in both chromosomal complements represented in a nucleic acid sample from a subject having a copy of each chromosome is useful for determining the zygosity of an individual for the polymorphic variant (i.e., whether the individual is homozygous or heterozygous for the polymorphic variant). Any oligonucleotide-based diagnostic may be utilized to determine whether a sample includes the presence or absence of a polymorphic variant in a sample. For example, primer extension methods, ligase sequence determination methods (e.g., U.S. Pat. Nos. 5,679,524 and 5,952,174, and WO 01/27326), mismatch sequence determination methods (e.g., U.S. Pat. Nos. 5,851,770; 5,958,692; 6,110,684; and 6,183,958), microarray sequence determination methods, restriction fragment length polymorphism (RFLP), single strand conformation polymorphism detection (SSCP) (e.g., U.S. Pat. Nos. 5,891,625 and 6,013,499), PCR-based assays (e.g., TAQMAN® PCR System (Applied Biosystems)), and nucleotide sequencing methods may be used.

[0120] Oligonucleotide extension methods typically involve providing a pair of oligonucleotide primers in a polymerase chain reaction (PCR) or in other nucleic acid amplification methods for the purpose of amplifying a region from the nucleic acid sample that comprises the polymorphic variation. One oligonucleotide primer is complementary to a region 3′ of the polymorphism and the other is complementary to a region 5′ of the polymorphism. A PCR primer pair may be used in methods disclosed in U.S. Pat. Nos. 4,683,195; 4,683,202, 4,965,188; 5,656,493; 5,998,143; 6,140,054; WO 01/27327; and WO 01/27329 for example. PCR primer pairs may also be used in any commercially available machines that perform PCR, such as any of the GENEAMP® Systems available from Applied Biosystems. Also, those of ordinary skill in the art will be able to design oligonucleotide primers based upon a nucleotide sequence set forth in SEQ ID NO: 1-7 without undue experimentation using knowledge readily available in the art.

[0121] Also provided is an extension oligonucleotide that hybridizes to the amplified fragment adjacent to the polymorphic variation. As used herein, the term “adjacent” refers to the 3′ end of the extension oligonucleotide being often 1 nucleotide from the 5′ end of the polymorphic site, and sometimes 2, 3, 4, 5, 6, 7, 8, 9, or 10 nucleotides from the 5′ end of the polymorphic site, in the nucleic acid when the extension oligonucleotide is hybridized to the nucleic acid. The extension oligonucleotide then is extended by one or more nucleotides, and the number and/or type of nucleotides that are added to the extension oligonucleotide determine whether the polymorphic variant is present. Oligonucleotide extension methods are disclosed, for example, in U.S. Pat. Nos. 4,656,127; 4,851,331; 5,679,524; 5,834,189; 5,876,934; 5,908,755; 5,912,118; 5,976,802; 5,981,186; 6,004,744; 6,013,431; 6,017,702; 6,046,005; 6,087,095; 6,210,891; and WO 01/20039. Oligonucleotide extension methods using mass spectrometry are described, for example, in U.S. Pat. Nos. 5,547,835; 5,605,798; 5,691,141; 5,849,542; 5,869,242; 5,928,906; 6,043,031; and 6,194,144, and a method often utilized is described herein in Example 2. Multiple extension oligonucleotides may be utilized in one reaction, which is referred to herein as “multiplexing.”

[0122] A microarray can be utilized for determining whether a polymorphic variant is present or absent in a nucleic acid sample. A microarray may include any oligonucleotides described herein, and methods for making and using oligonucleotide microarrays suitable for diagnostic use are disclosed in U.S. Pat. Nos. 5,492,806; 5,525,464; 5,589,330; 5,695,940; 5,849,483; 6,018,041; 6,045,996; 6,136,541; 6,142,681; 6,156,501; 6,197,506; 6,223,127; 6,225,625; 6,229,911; 6,239,273; WO 00/52625; WO 01/25485; and WO 01/29259. The microarray typically comprises a solid support and the oligonucleotides may be linked to this solid support by covalent bonds or by non-covalent interactions. The oligonucleotides may also be linked to the solid support directly or by a spacer molecule. A microarray may comprise one or more oligonucleotides complementary to a polymorphic site set forth in SEQ ID NO: 1-7 or below.

[0123] A kit also may be utilized for determining whether a polymorphic variant is present or absent in a nucleic acid sample. A kit often comprises one or more pairs of oligonucleotide primers useful for amplifying a fragment of a ICAM, MAPK10, KIAA0861, NUMA1, GALE, DPF3 or LOC145197 nucleotide sequence or a substantially identical sequence thereof, where the fragment includes a polymorphic site. The kit sometimes comprises a polymerizing agent, for example, a thermostable nucleic acid polymerase such as one disclosed in U.S. Pat. No. 4,889,818 or 6,077,664. Also, the kit often comprises an elongation oligonucleotide that hybridizes to a ICAM, MAPK10, KIAA0861, NUMA1, GALE, DPF3 or LOC145197 nucleotide sequence in a nucleic acid sample adjacent to the polymorphic site. Where the kit includes an elongation oligonucleotide, it also often comprises chain elongating nucleotides, such as dATP, dTTP, dGTP, dCTP, and dTTP, including analogs of dATP, dTTP, dGTP, dCTP and dTTP, provided that such analogs are substrates for a thermostable nucleic acid polymerase and can be incorporated into a nucleic acid chain elongated from the extension oligonucleotide. Along with chain elongating nucleotides would be one or more chain terminating nucleotides such as ddATP, ddTTP, ddGTP, ddCTP, and the like. In an embodiment, the kit comprises one or more oligonucleotide primer pairs, a polymerizing agent, chain elongating nucleotides, at least one elongation oligonucleotide, and one or more chain terminating nucleotides. Kits optionally include buffers, vials, microtiter plates, and instructions for use.

[0124] An individual identified as being at risk of breast cancer may be heterozygous or homozygous with respect to the allele associated with a higher risk of breast cancer. A subject homozygous for an allele associated with an increased risk of breast cancer is at a comparatively high risk of breast cancer, a subject heterozygous for an allele associated with an increased risk of breast cancer is at a comparatively intermediate risk of breast cancer, and a subject homozygous for an allele associated with a decreased risk of breast cancer is at a comparatively low risk of breast cancer. A genotype may be assessed for a complementary strand, such that the complementary nucleotide at a particular position is detected.

[0125] Also featured are methods for determining risk of breast cancer and/or identifying a subject at risk of breast cancer by contacting a polypeptide or protein encoded by a ICAM, MAPK10, KIAA0861, NUMA1, GALE, DPF3 or LOC145197 nucleotide sequence from a subject with an antibody that specifically binds to an epitope associated with increased risk of breast cancer in the polypeptide. In certain embodiments, the antibody specifically binds to an epitope that comprises a leucine at amino acid position 359 in SEQ ID NO: 23, a leucine at amino acid position 378 in SEQ ID NO: 23, an alanine at amino acid position 857 in SEQ ID NO: 23, an alanine at position 902 in SEQ ID NO: 23 a proline at amino acid position 352 in SEQ ID NO: 20 or an alanine at amino acid position 348 in SEQ ID NO: 20.

[0126] Applications of Prognostic and Diagnostic Results to Pharmacogenomic Methods

[0127] Pharmacogenomics is a discipline that involves tailoring a treatment for a subject according to the subject's genotype. For example, based upon the outcome of a prognostic test described herein, a clinician or physician may target pertinent information and preventative or therapeutic treatments to a subject who would be benefited by the information or treatment and avoid directing such information and treatments to a subject who would not be benefited (e.g., the treatment has no therapeutic effect and/or the subject experiences adverse side effects). As therapeutic approaches for breast cancer continue to evolve and improve, the goal of treatments for breast cancer related disorders is to intervene even before clinical signs (e.g., identification of lump in the breast) first manifest. Thus, genetic markers associated with susceptibility to breast cancer prove useful for early diagnosis, prevention and treatment of breast cancer.

[0128] The following is an example of a pharmacogenomic embodiment. A particular treatment regimen can exert a differential effect depending upon the subject's genotype. Where a candidate therapeutic exhibits a significant interaction with a major allele and a comparatively weak interaction with a minor allele (e.g., an order of magnitude or greater difference in the interaction), such a therapeutic typically would not be administered to a subject genotyped as being homozygous for the minor allele, and sometimes not administered to a subject genotyped as being heterozygous for the minor allele. In another example, where a candidate therapeutic is not significantly toxic when administered to subjects who are homozygous for a major allele but is comparatively toxic when administered to subjects heterozygous or homozygous for a minor allele, the candidate therapeutic is not typically administered to subjects who are genotyped as being heterozygous or homozygous with respect to the minor allele.

[0129] The methods described herein are applicable to pharmacogenomic methods for detecting, preventing, alleviating and/or treating breast cancer. For example, a nucleic acid sample from an individual may be subjected to a genetic test described herein. Where one or more polymorphic variations associated with increased risk of breast cancer are identified in a subject, information for detecting, preventing or treating breast cancer and/or one or more breast cancer detection, prevention and/or treatment regimens then may be directed to and/or prescribed to that subject.

[0130] In certain embodiments, a detection, prevenative and/or treatment regimen is specifically prescribed and/or administered to individuals who will most benefit from it based upon their risk of developing breast cancer assessed by the methods described herein. Thus, provided are methods for identifying a subject at risk of breast cancer and then prescribing a detection, therapeutic or preventative regimen to individuals identified as being at risk of breast cancer. Thus, certain embodiments are directed to methods for treating breast cancer in a subject, reducing risk of breast cancer in a subject, or early detection of breast cancer in a subject, which comprise: detecting the presence or absence of a polymorphic variant associated with breast cancer in a nucleotide sequence in a nucleic acid sample from a subject, where the nucleotide sequence comprises a polynucleotide sequence selected from the group consisting of: (a) a nucleotide sequence set forth in SEQ ID NO: 1-7; (b) a nucleotide sequence which encodes a polypeptide having an amino acid sequence encoded by a nucleotide sequence in SEQ ID NO: 1-7; (c) a nucleotide sequence which encodes a polypeptide that is 90% or more identical to an amino acid sequence encoded by a nucleotide sequence in SEQ ID NO: 1-7 or a nucleotide sequence about 90% or more identical to the nucleotide sequence set forth in SEQ ID NO: 1-7; and (d) a fragment of a nucleotide sequence of (a), (b), or (c), sometimes comprising a polymorphic site associated with breast cancer; and prescribing or administering a breast cancer treatment regimen, preventative regimen and/or detection regimen to a subject from whom the sample originated where the presence of one or more polymorphic variations associated with breast cancer are detected in the nucleotide sequence. In these methods, genetic results may be utilized in combination with other test results to diagnose breast cancer as described above. Other test results include but are not limited to mammography results, imaging results, biopsy results and results from BRCA1 or BRAC2 test results, as described above.

[0131] Detection regimens include one or more mammography procedures, a regular mammography regimen (e.g., once a year, or once every six, four, three or two months); an early mammography regimen (e.g., mammography tests are performed beginning at age 25, 30, or 35); one or more biopsy procedures (e.g., a regular biopsy regimen beginning at age 40); breast biopsy and biopsy from other tissue; breast ultrasound and optionally ultrasound analysis of another tissue; breast magnetic resonance imaging (MRI) and optionally MRI analysis of another tissue; electrical impedance (T-scan) analysis of breast and optionally another tissue; ductal lavage; nuclear medicine analysis (e.g., scintimammography); BRCA1 and/or BRCA2 sequence analysis results; and/or thermal imaging of the breast and optionally another tissue.

[0132] Treatments sometimes are preventative (e.g., is prescribed or administered to reduce the probability that a breast cancer associated condition arises or progresses), sometimes are therapeutic, and sometimes delay, alleviate or halt the progression of breast cancer. Any known preventative or therapeutic treatment for alleviating or preventing the occurrence of breast cancer is prescribed and/or administered. For example, certain preventative treatments often are prescribed to subjects having a predisposition to breast cancer and where the subject is not diagnosed with breast cancer or is diagnosed as having symptoms indicative of early stage breast cancer (e.g., stage I). For subjects not diagnosed as having breast cancer, any preventative treatments known in the art can be prescribed and administered, which include selective hormone receptor modulators (e.g., selective estrogen receptor modulators (SERMs) such as tamoxifen, reloxifene, and toremifene); compositions that prevent production of hormones (e.g., aramotase inhibitors that prevent the production of estrogen in the adrenal gland, such as exemestane, letrozole, anastrozol, groserelin, and megestrol); other hormonal treatments (e.g., goserelin acetate and fulvestrant); biologic response modifiers such as antibodies (e.g., trastuzumab (herceptin/HER2)); surgery (e.g., lumpectomy and mastectomy); drugs that delay or halt metastasis (e.g., pamidronate disodium); and alternative/complementary medicine (e.g., acupuncture, acupressure, moxibustion, qi gong, reiki, ayurveda, vitamins, minerals, and herbs (e.g., astragalus root, burdock root, garlic, green tea, and licorice root)).

[0133] The use of breast cancer treatments are well known in the art, and include surgery, chemotherapy and/or radiation therapy. Any of the treatments may be used in combination to treat or prevent breast cancer (e.g., surgery followed by radiation therapy or chemotherapy). Examples of chemotherapeutics are taxanes (e.g., docetaxel or paclitaxel), and examples of chemotherapy combinations used to treat breast cancer include: cyclophosphamide (Cytoxan), methotrexate (Amethopterin, Mexate, Folex), and fluorouracil (Fluorouracil, 5-Fu, Adrucil), which is referred to as CMF; cyclophosphamide, doxorubicin (Adriamycin), and fluorouracil, which is referred to as CAF; and doxorubicin (Adriamycin) and cyclophosphamide, which is referred to as AC.

[0134] As breast cancer preventative and treatment information can be specifically targeted to subjects in need thereof (e.g., those at risk of developing breast cancer or those that have early signs of breast cancer), provided herein is a method for preventing or reducing the risk of developing breast cancer in a subject, which comprises: (a) detecting the presence or absence of a polymorphic variation associated with breast cancer at a polymorphic site in a nucleotide sequence in a nucleic acid sample from a subject; (b) identifying a subject with a predisposition to breast cancer, whereby the presence of the polymorphic variation is indicative of a predisposition to breast cancer in the subject; and (c) if such a predisposition is identified, providing the subject with information about methods or products to prevent or reduce breast cancer or to delay the onset of breast cancer. Also provided is a method of targeting information or advertising to a subpopulation of a human population based on the subpopulation being genetically predisposed to a disease or condition, which comprises: (a) detecting the presence or absence of a polymorphic variation associated with breast cancer at a polymorphic site in a nucleotide sequence in a nucleic acid sample from a subject; (b) identifying the subpopulation of subjects in which the polymorphic variation is associated with breast cancer; and (c) providing information only to the subpopulation of subjects about a particular product which may be obtained and consumed or applied by the subject to help prevent or delay onset of the disease or condition.

[0135] Pharmacogenomics methods also may be used to analyze and predict a response to a breast cancer treatment or a drug. For example, if pharmacogenomics analysis indicates a likelihood that an individual will respond positively to a breast cancer treatment with a particular drug, the drug may be administered to the individual. Conversely, if the analysis indicates that an individual is likely to respond negatively to treatment with a particular drug, an alternative course of treatment may be prescribed. A negative response may be defined as either the absence of an efficacious response or the presence of toxic side effects. The response to a therapeutic treatment can be predicted in a background study in which subjects in any of the following populations are genotyped: a population that responds favorably to a treatment regimen, a population that does not respond significantly to a treatment regimen, and a population that responds adversely to a treatment regiment (e.g., exhibits one or more side effects). These populations are provided as examples and other populations and subpopulations may be analyzed. Based upon the results of these analyses, a subject is genotyped to predict whether he or she will respond favorably to a treatment regimen, not respond significantly to a treatment regimen, or respond adversely to a treatment regimen.

[0136] The methods described herein also are applicable to clinical drug trials. One or more polymorphic variants indicative of response to an agent for treating breast cancer or to side effects to an agent for treating breast cancer may be identified using the methods described herein. Thereafter, potential participants in clinical trials of such an agent may be screened to identify those individuals most likely to respond favorably to the drug and exclude those likely to experience side effects. In that way, the effectiveness of drug treatment may be measured in individuals who respond positively to the drug, without lowering the measurement as a result of the inclusion of individuals who are unlikely to respond positively in the study and without risking undesirable safety problems. In certain embodiments, the agent for treating breast cancer described herein targets ICAM, MAPK10, KIAA0861, NUMA1, GALE, DPF3 or LOC145197 or a target in the ICAM, MAPK10, KIAA0861, NUMA1, GALE, DPF3 or LOC145197 pathway.

[0137] Thus, another embodiment is a method of selecting an individual for inclusion in a clinical trial of a treatment or drug comprising the steps of: (a) obtaining a nucleic acid sample from an individual; (b) determining the identity of a polymorphic variation which is associated with a positive response to the treatment or the drug, or at least one polymorphic variation which is associated with a negative response to the treatment or the drug in the nucleic acid sample, and (c) including the individual in the clinical trial if the nucleic acid sample contains said polymorphic variation associated with a positive response to the treatment or the drug or if the nucleic acid sample lacks said polymorphic variation associated with a negative response to the treatment or the drug. In addition, the methods for selecting an individual for inclusion in a clinical trial of a treatment or drug encompass methods with any further limitation described in this disclosure, or those following, specified alone or in any combination. The polymorphic variation may be in a sequence selected individually or in any combination from the group consisting of (i) a polynucleotide sequence set forth in SEQ ID NO: 1-7; (ii) a polynucleotide sequence that is 90% or more identical to a nucleotide sequence set forth in SEQ ID NO: 1-7; (iii) a polynucleotide sequence that encodes a polypeptide having an amino acid sequence identical to or 90% or more identical to an amino acid sequence encoded by a nucleotide sequence set forth in SEQ ID NO: 1-7; and (iv) a fragment of a polynucleotide sequence of (i), (ii), or (iii) comprising the polymorphic site. The including step (c) optionally comprises administering the drug or the treatment to the individual if the nucleic acid sample contains the polymorphic variation associated with a positive response to the treatment or the drug and the nucleic acid sample lacks said biallelic marker associated with a negative response to the treatment or the drug.

[0138] Also provided herein is a method of partnering between a diagnostic/prognostic testing provider and a provider of a consumable product, which comprises: (a) the diagnostic/prognostic testing provider detects the presence or absence of a polymorphic variation associated with breast cancer at a polymorphic site in a nucleotide sequence in a nucleic acid sample from a subject; (b) the diagnostic/prognostic testing provider identifies the subpopulation of subjects in which the polymorphic variation is associated with breast cancer; (c) the diagnostic/prognostic testing provider forwards information to the subpopulation of subjects about a particular product which may be obtained and consumed or applied by the subject to help prevent or delay onset of the disease or condition; and (d) the provider of a consumable product forwards to the diagnostic test provider a fee every time the diagnostic/prognostic test provider forwards information to the subject as set forth in step (c) above.

[0139] Compositions Comprising Breast Cancer-Directed Molecules

[0140] Featured herein is a composition comprising a breast cancer cell and one or more molecules specifically directed and targeted to a nucleic acid comprising a ICAM, MAPK10, KIAA0861, NUMA1, GALE, DPF3 or LOC145197 nucleotide sequence or a ICAM, MAPK10, KIAA0861, NUMA1, GALE, DPF3 or LOC145197 polypeptide. Such directed molecules include, but are not limited to, a compound that binds to a ICAM, MAPK10, KIAA0861, NUMA1, GALE, DPF3 or LOC145197 nucleic acid or a ICAM, MAPK10, KIAA0861, NUMA1, GALE, DPF3 or LOC145197 polypeptide; a RNA1 or siRNA molecule having a strand complementary to a ICAM, MAPK10, KIAA0861, NUMA1, GALE, DPF3 or LOC145197 nucleotide sequence; an antisense nucleic acid complementary to an RNA encoded by a ICAM, MAPK10, KIAA0861, NUMA1, GALE, DPF3 or LOC145197 DNA sequence; a ribozyme that hybridizes to a ICAM, MAPK10, KIAA0861, NUMA1, GALE, DPF3 or LOC145197 nucleotide sequence; a nucleic acid aptamer that specifically binds a ICAM, MAPK10, KIAA0861, NUMA1, GALE, DPF3 or LOC145197 polypeptide; and an antibody that specifically binds to a ICAM, MAPK10, KIAA0861, NUMA1, GALE, DPF3 or LOC145197 polypeptide or binds to a ICAM, MAPK10, KIAA0861, NUMA1, GALE, DPF3 or LOC145197 nucleic acid. In certain embodiments, the antibody specifically binds to an epitope that comprises a leucine at amino acid position 359 in SEQ ID NO: 23, a leucine at amino acid position 378 in SEQ ID NO: 23, an alanine at amino acid position 857 in SEQ ID NO: 23, an alanine at position 902 in SEQ ID NO: 23 a proline at amino acid position 352 in SEQ ID NO: 20 or an alanine at amino acid position 348 in SEQ ID NO: 20. In specific embodiments, the breast cancer directed molecule interacts with a ICAM, MAPK10, KIAA0861, NUMA1, GALE, DPF3 or LOC145197 nucleic acid or polypeptide variant associated with breast cancer. In other embodiments, the breast cancer directed molecule interacts with a polypeptide involved in the ICAM, MAPK10, KIAA 0861, NUMA1, GALE, DPF3 or LOC145197 signal pathway, or a nucleic acid encoding such a polypeptide. Polypeptides involved in the ICAM, MAPK10, KIAA0861, NUMA1, GALE, DPF3 or LOC145197 signal pathway are discussed herein.

[0141] Compositions sometimes include an adjuvant known to stimulate an immune response, and in certain embodiments, an adjuvant that stimulates a T-cell lymphocyte response. Adjuvants are known, including but not limited to an aluminum adjuvant (e.g., aluminum hydroxide); a cytokine adjuvant or adjuvant that stimulates a cytokine response (e.g., interleukin (IL)-12 and/or gamma-interferon cytokines); a Freund-type mineral oil adjuvant emulsion (e.g., Freund's complete or incomplete adjuvant); a synthetic lipoid compound; a copolymer adjuvant (e.g., TitreMax); a saponin; Quil A; a liposome; an oil-in-water emulsion (e.g., an emulsion stabilized by Tween 80 and pluronic polyoxyethlene/polyoxypropylene block copolymer (Syntex Adjuvant Formulation); TitreMax; detoxified endotoxin (MPL) and mycobacterial cell wall components (TDW, CWS) in 2% squalene (Ribi Adjuvant System)); a muramyl dipeptide; an immune-stimulating complex (ISCOM, e.g., an Ag-modified saponin/cholesterol micelle that forms stable cage-like structure); an aqueous phase adjuvant that does not have a depot effect (e.g., Gerbu adjuvant); a carbohydrate polymer (e.g., AdjuPrime); L-tyrosine; a manide-oleate compound (e.g., Montanide); an ethylene-vinyl acetate copolymer (e.g., Elvax 40W1,2); or lipid A, for example. Such compositions are useful for generating an immune response against a breast cancer directed molecule (e.g., an HLA-binding subsequence within a polypeptide encoded by a nucleotide sequence in SEQ ID NO: 1). In such methods, a peptide having an amino acid subsequence of a polypeptide encoded by a nucleotide sequence in SEQ ID NO: 1-7 is delivered to a subject, where the subsequence binds to an HLA molecule and induces a CTL lymphocyte response. The peptide sometimes is delivered to the subject as an isolated peptide or as a minigene in a plasmid that encodes the peptide. Methods for identifying HLA-binding subsequences in such polypeptides are known (see e.g., publication WO02/20616 and PCT application U.S.98/01373 for methods of identifying such sequences).

[0142] The breast cancer cell may be in a group of breast cancer cells and/or other types of cells cultured in vitro or in a tissue having breast cancer cells (e.g., a melanocytic lesion) maintained in vitro or present in an animal in vivo (e.g., a rat, mouse, ape or human). In certain embodiments, a composition comprises a component from a breast cancer cell or from a subject having a breast cancer cell instead of the breast cancer cell or in addition to the breast cancer cell, where the component sometimes is a nucleic acid molecule (e.g., genomic DNA), a protein mixture or isolated protein, for example. The aforementioned compositions have utility in diagnostic, prognostic and pharmacogenomic methods described previously and in breast cancer therapeutics described hereafter. Certain breast cancer molecules are described in greater detail below.

[0143] Compounds

[0144] Compounds can be obtained using any of the numerous approaches in combinatorial library methods known in the art, including: biological libraries; peptoid libraries (libraries of molecules having the functionalities of peptides, but with a novel, non-peptide backbone which are resistant to enzymatic degradation but which nevertheless remain bioactive (see, e.g., Zuckermann et al., J. Med. Chem. 37: 2678-85 (1994)); spatially addressable parallel solid phase or solution phase libraries; synthetic library methods requiring deconvolution; “one-bead one-compound” library methods; and synthetic library methods using affinity chromatography selection. Biological library and peptoid library approaches are typically limited to peptide libraries, while the other approaches are applicable to peptide, non-peptide oligomer or small molecule libraries of compounds (Lam, Anticancer Drug Des. 12: 145, (1997)). Examples of methods for synthesizing molecular libraries are described, for example, in DeWitt et al., Proc. Natl. Acad. Sci. U.S.A. 90: 6909 (1993); Erb et al., Proc. Natl. Acad. Sci. USA 91: 11422 (1994); Zuckermann et al., J. Med. Chem. 37: 2678 (1994); Cho et al., Science 261: 1303 (1993); Carrell et al., Angew. Chem. Int. Ed. Engl. 33: 2059 (1994); Carell et al., Angew. Chem. Int. Ed. Engl. 33: 2061 (1994); and in Gallop et al., J. Med. Chem. 37: 1233 (1994).

[0145] Libraries of compounds may be presented in solution (e.g., Houghten, Biotechniques 13: 412-421 (1992)), or on beads (Lam, Nature 354: 82-84 (1991)), chips (Fodor, Nature 364: 555-556 (1993)), bacteria or spores (Ladner, U.S. Pat. No. 5,223,409), plasmids (Cull et al., Proc. Natl. Acad. Sci. USA 89: 1865-1869 (1992)) or on phage (Scott and Smith, Science 249: 386-390 (1990); Devlin, Science 249: 404-406 (1990); Cwirla et al., Proc. Natl. Acad. Sci. 87: 6378-6382 (1990); Felici, J. Mol. Biol. 222: 301-310 (1991); Ladner supra.).

[0146] A compound sometimes alters expression and sometimes alters activity of a ICAM, MAPK10, KIAA0861, NUMA1, GALE, DPF3 or LOC145197 polypeptide and may be a small molecule. Small molecules include, but are not limited to, peptides, peptidomimetics (e.g., peptoids), amino acids, amino acid analogs, polynucleotides, polynucleotide analogs, nucleotides, nucleotide analogs, organic or inorganic compounds (i.e., including heteroorganic and organometallic compounds) having a molecular weight less than about 10,000 grams per mole, organic or inorganic compounds having a molecular weight less than about 5,000 grams per mole, organic or inorganic compounds having a molecular weight less than about 1,000 grams per mole, organic or inorganic compounds having a molecular weight less than about 500 grams per mole, and salts, esters, and other pharmaceutically acceptable forms of such compounds.

[0147] Antisense Nucleic Acid Molecules, Ribozymes. RNAi, siRNA and Modified Nucleic Acid Molecules

[0148] An “antisense” nucleic acid refers to a nucleotide sequence complementary to a “sense” nucleic acid encoding a polypeptide, e.g., complementary to the coding strand of a double-stranded cDNA molecule or complementary to an mRNA sequence. The antisense nucleic acid can be complementary to an entire coding strand in SEQ ID NO: 1-17, or to a portion thereof or a substantially identical sequence thereof. In another embodiment, the antisense nucleic acid molecule is antisense to a “noncoding region” of the coding strand of a nucleotide sequence in SEQ ID NO: 1-17 (e.g., 5′ and 3′ untranslated regions).

[0149] An antisense nucleic acid can be designed such that it is complementary to the entire coding region of an mRNA encoded by a nucleotide sequence in SEQ ID NO: 1-7 (e.g., SEQ ID NO: 8-14), and often the antisense nucleic acid is an oligonucleotide antisense to only a portion of a coding or noncoding region of the mRNA. For example, the antisense oligonucleotide can be complementary to the region surrounding the translation start site of the mRNA, e.g., between the −10 and +10 regions of the target gene nucleotide sequence of interest. An antisense oligonucleotide can be, for example, about 7, 10, 15, 20, 25, 30, 35, 40, 45, 50, 55, 60, 65, 70, 75, 80, or more nucleotides in length. The antisense nucleic acids, which include the ribozymes described hereafter, can be designed to target a nucleotide sequence in SEQ ID NO: 1-17, often a variant associated with breast cancer, or a substantially identical sequence thereof. Among the variants, minor alleles and major alleles can be targeted, and those associated with a higher risk of breast cancer are often designed, tested, and administered to subjects.

[0150] An antisense nucleic acid can be constructed using chemical synthesis and enzymatic ligation reactions using standard procedures. For example, an antisense nucleic acid (e.g., an antisense oligonucleotide) can be chemically synthesized using naturally occurring nucleotides or variously modified nucleotides designed to increase the biological stability of the molecules or to increase the physical stability of the duplex formed between the antisense and sense nucleic acids, e.g., phosphorothioate derivatives and acridine substituted nucleotides can be used. Antisense nucleic acid also can be produced biologically using an expression vector into which a nucleic acid has been subcloned in an antisense orientation (i.e., RNA transcribed from the inserted nucleic acid will be of an antisense orientation to a target nucleic acid of interest, described further in the following subsection).

[0151] When utilized as therapeutics, antisense nucleic acids typically are administered to a subject (e.g., by direct injection at a tissue site) or generated in situ such that they hybridize with or bind to cellular mRNA and/or genomic DNA encoding a polypeptide and thereby inhibit expression of the polypeptide, for example, by inhibiting transcription and/or translation. Alternatively, antisense nucleic acid molecules can be modified to target selected cells and then are administered systemically. For systemic administration, antisense molecules can be modified such that they specifically bind to receptors or antigens expressed on a selected cell surface, for example, by linking antisense nucleic acid molecules to peptides or antibodies which bind to cell surface receptors or antigens. Antisense nucleic acid molecules can also be delivered to cells using the vectors described herein. Sufficient intracellular concentrations of antisense molecules are achieved by incorporating a strong promoter, such as a pol II or pol III promoter, in the vector construct.

[0152] Antisense nucleic acid molecules sometimes are alpha-anomeric nucleic acid molecules. An alpha-anomeric nucleic acid molecule forms specific double-stranded hybrids with complementary RNA in which, contrary to the usual beta-units, the strands run parallel to each other (Gaultier et al., Nucleic Acids. Res. 15: 6625-6641 (1987)). Antisense nucleic acid molecules can also comprise a 2′-o-methylribonucleotide (Inoue et al., Nucleic Acids Res. 15: 6131-6148 (1987)) or a chimeric RNA-DNA analogue (Inoue et al., FEBS Lett. 215: 327-330 (1987)). Antisense nucleic acids sometimes are composed of DNA or PNA or any other nucleic acid derivatives described previously.

[0153] In another embodiment, an antisense nucleic acid is a ribozyme. A ribozyme having specificity for a ICAM, MAPK10, KIAA0861, NUMA1, GALE, DPF3 or LOC145197 nucleotide sequence can include one or more sequences complementary to such a nucleotide sequence, and a sequence having a known catalytic region responsible for mRNA cleavage (see e.g., U.S. Pat. No. 5,093,246 or Haselhoff and Gerlach, Nature 334: 585-591(1988)). For example, a derivative of a Tetrahymena L-19 IVS RNA is sometimes utilized in which the nucleotide sequence of the active site is complementary to the nucleotide sequence to be cleaved in a mRNA (see e.g., Cech et al., U.S. Pat. No. 4,987,071; and Cech et al. U.S. Pat. No. 5,116,742). Also, target mRNA sequences can be used to select a catalytic RNA having a specific ribonuclease activity from a pool of RNA molecules (see e.g., Bartel & Szostak, Science 261: 1411-1418(1993)).

[0154] Breast cancer directed molecules include in certain embodiments nucleic acids that can form triple helix structures with a ICAM, MAPK10, KIAA0861, NUMA1, GALE, DPF3 or LOC145197 nucleotide sequence or a substantially identical sequence thereof, especially one that includes a regulatory region that controls expression of a polypeptide. Gene expression can be inhibited by targeting nucleotide sequences complementary to the regulatory region of a ICAM, MAPK10, KIAA0861, NUMA1, GALE, DPF3 or LOC145197 nucleotide sequence or a substantially identical sequence (e.g., promoter and/or enhancers) to form triple helical structures that prevent transcription of a gene in target cells (see e.g., Helene, Anticancer Drug Des. 6(6): 569-84 (1991); Helene et al., Ann. N.Y. Acad. Sci. 660: 27-36 (1992); and Maher, Bioassays 14(12): 807-15 (1992). Potential sequences that can be targeted for triple helix formation can be increased by creating a so-called “switchback” nucleic acid molecule. Switchback molecules are synthesized in an alternating 5′-3′,3′-5′ manner, such that they base pair with first one strand of a duplex and then the other, eliminating the necessity for a sizeable stretch of either purines or pyrimidines to be present on one strand of a duplex.

[0155] Breast cancer directed molecules include RNAi and siRNA nucleic acids. Gene expression may be inhibited by the introduction of double-stranded RNA (dsRNA), which induces potent and specific gene silencing, a phenomenon called RNA interference or RNAi. See, e.g., Fire et al., U.S. Pat. No. 6,506,559; Tuschl et al. PCT International Publication No. WO 01/75164; Kay et al. PCT International Publication No. WO 03/010180A1; or Bosher J M, Labouesse, Nat Cell Biol 2000 February; 2(2): E31-6. This process has been improved by decreasing the size of the double-stranded RNA to 20-24 base pairs (to create small-interfering RNAs or siRNAs) that “switched off” genes in mammalian cells without initiating an acute phase response, i.e., a host defense mechanism that often results in cell death (see, e.g., Caplen et al. Proc Natl Acad Sci USA. 2001 Aug. 14; 98(17): 9742-7 and Elbashir et al. Methods 2002 February; 26(2): 199-213). There is increasing evidence of post-transcriptional gene silencing by RNA interference (RNAi) for inhibiting targeted expression in mammalian cells at the mRNA level, in human cells. There is additional evidence of effective methods for inhibiting the proliferation and migration of tumor cells in human patients, and for inhibiting metastatic cancer development (see, e.g., U.S. Patent Application No. U.S. 2001000993183; Caplen et al. Proc Natl Acad Sci USA; and Abderrahmani et al. Mol Cell Biol 2001 November 21(21): 7256-67).

[0156] An “siRNA” or “RNAi” refers to a nucleic acid that forms a double stranded RNA and has the ability to reduce or inhibit expression of a gene or target gene when the siRNA is delivered to or expressed in the same cell as the gene or target gene. “siRNA” refers to short double-stranded RNA formed by the complementary strands. Complementary portions of the siRNA that hybridize to form the double stranded molecule often have substantial or complete identity to the target molecule sequence. In one embodiment, an siRNA refers to a nucleic acid that has substantial or complete identity to a target gene and forms a double stranded siRNA.

[0157] When designing the siRNA molecules, the targeted region often is selected from a given DNA sequence beginning 50 to 100 nucleotides downstream of the start codon. See, e.g., Elbashir et al.,. Methods 26: 199-213 (2002). Initially, 5′ or 3′ UTRs and regions nearby the start codon were avoided assuming that UTR-binding proteins and/or translation initiation complexes may interfere with binding of the siRNP or RISC endonuclease complex. Sometimes regions of the target 23 nucleotides in length conforming to the sequence motif AA(N19)TT (N, an nucleotide), and regions with approximately 30% to 70% G/C-content (often about 50% G/C-content) often are selected. If no suitable sequences are found, the search often is extended using the motif NA(N21). The sequence of the sense siRNA sometimes corresponds to (N 9) TT or N21 (position 3 to 23 of the 23-nt motif), respectively. In the latter case, the 3′ end of the sense siRNA often is converted to TT. The rationale for this sequence conversion is to generate a symmetric duplex with respect to the sequence composition of the sense and antisense 3′ overhangs. The antisense siRNA is synthesized as the complement to position 1 to 21 of the 23-nt motif. Because position 1 of the 23-nt motif is not recognized sequence-specifically by the antisense siRNA, the 3′-most nucleotide residue of the antisense siRNA can be chosen deliberately. However, the penultimate nucleotide of the antisense siRNA (complementary to position 2 of the 23-nt motif) often is complementary to the targeted sequence. For simplifying chemical synthesis, TT often is utilized. siRNAs corresponding to the target motif NAR(N17)YNN, where R is purine (A,G) and Y is pyrimidine (C,U), often are selected. Respective 21 nucleotide sense and antisense siRNAs often begin with a purine nucleotide and can also be expressed from pol III expression vectors without a change in targeting site. Expression of RNAs from pol III promoters often is efficient when the first transcribed nucleotide is a purine.

[0158] The sequence of the siRNA can correspond to the full length target gene, or a subsequence thereof. Often, the siRNA is about 15 to about 50 nucleotides in length (e.g., each complementary sequence of the double stranded siRNA is 15-50 nucleotides in length, and the double stranded siRNA is about 15-50 base pairs in length, sometimes about 20-30 nucleotides in length or about 20-25 nucleotides in length, e.g., 20, 21, 22, 23, 24, 25, 26, 27, 28, 29, or 30 nucleotides in length. The siRNA sometimes is about 21 nucleotides in length. Methods of using siRNA are well known in the art, and specific siRNA molecules may be purchased from a number of companies including Dharmacon Research, Inc.

[0159] Antisense, ribozyme, RNAi and siRNA nucleic acids can be altered to form modified nucleic acid molecules. The nucleic acids can be altered at base moieties, sugar moieties or phosphate backbone moieties to improve stability, hybridization, or solubility of the molecule. For example, the deoxyribose phosphate backbone of nucleic acid molecules can be modified to generate peptide nucleic acids (see Hyrup et al., Bioorganic & Medicinal Chemistry 4 (1): 5-23 (1996)). As used herein, the terms “peptide nucleic acid” or “PNA” refers to a nucleic acid mimic such as a DNA mimic, in which the deoxyribose phosphate backbone is replaced by a pseudopeptide backbone and only the four natural nucleobases are retained. The neutral backbone of a PNA can allow for specific hybridization to DNA and RNA under conditions of low ionic strength. Synthesis of PNA oligomers can be performed using standard solid phase peptide synthesis protocols as described, for example, in Hyrup et al., (1996) supra and Perry-O'Keefe et al., Proc. Natl. Acad. Sci. 93: 14670-675 (1996).

[0160] PNA nucleic acids can be used in prognostic, diagnostic, and therapeutic applications. For example, PNAs can be used as antisense or antigene agents for sequence-specific modulation of gene expression by, for example, inducing transcription or translation arrest or inhibiting replication. PNA nucleic acid molecules can also be used in the analysis of single base pair mutations in a gene, (e.g., by PNA-directed PCR clamping); as “artificial restriction enzymes” when used in combination with other enzymes, (e.g., S1 nucleases (Hyrup (1996) supra)); or as probes or primers for DNA sequencing or hybridization (Hyrup et al., (1996) supra; Perry-O'Keefe supra).

[0161] In other embodiments, oligonucleotides may include other appended groups such as peptides (e.g., for targeting host cell receptors in vivo), or agents facilitating transport across cell membranes (see e.g., Letsinger et al., Proc. Natl. Acad. Sci. USA 86: 6553-6556 (1989); Lemaitre et al., Proc. Natl. Acad. Sci. USA 84: 648-652 (1987); PCT Publication No. WO88/09810) or the blood-brain barrier (see, e.g., PCT Publication No. WO89/10134). In addition, oligonucleotides can be modified with hybridization-triggered cleavage agents (See, e.g., Krol et al., Bio-Techniques 6: 958-976 (1988)) or intercalating agents. (See, e.g., Zon, Pharm. Res. 5: 539-549 (1988)). To this end, the oligonucleotide may be conjugated to another molecule, (e.g., a peptide, hybridization triggered cross-linking agent, transport agent, or hybridization-triggered cleavage agent).

[0162] Also included herein are molecular beacon oligonucleotide primer and probe molecules having one or more regions complementary to a nucleotide sequence of SEQ ID NO: 1-17 or a substantially identical sequence thereof, two complementary regions one having a fluorophore and one a quencher such that the molecular beacon is useful for quantifying the presence of the nucleic acid in a sample. Molecular beacon nucleic acids are described, for example, in Lizardi et al., U.S. Pat. No. 5,854,033; Nazarenko et al., U.S. Pat. No. 5,866,336, and Livak et al., U.S. Pat. No. 5,876,930.

[0163] Antibodies

[0164] The term “antibody” as used herein refers to an immunoglobulin molecule or immunologically active portion thereof, i.e., an antigen-binding portion. Examples of immunologically active portions of immunoglobulin molecules include F(ab) and F(ab′)₂ fragments which can be generated by treating the antibody with an enzyme such as pepsin. An antibody sometimes is a polyclonal, monoclonal, recombinant (e.g, a chimeric or humanized), fully human, non-human (e.g., murine), or a single chain antibody. For example, antibodies that specifically bind to ICAM1 are disclosed in U.S. Pat. Nos. 5,475,091 and 5,773,293. An antibody may have effector function and can fix complement, and is sometimes coupled to a toxin or imaging agent.

[0165] A full-length polypeptide or antigenic peptide fragment encoded by a ICAM, MAPK10, KIAA0861, NUMA1, GALE, DPF3 or LOC145197 nucleotide sequence can be used as an immunogen or can be used to identify antibodies made with other immunogens, e.g., cells, membrane preparations, and the like. An antigenic peptide often includes at least 8 amino acid residues of the amino acid sequences encoded by a nucleotide sequence of SEQ ID NO: 1-17, or substantially identical sequence thereof, and encompasses an epitope. Antigenic peptides sometimes include 10 or more amino acids, 15 or more amino acids, 20 or more amino acids, or 30 or more amino acids. Hydrophilic and hydrophobic fragments of polypeptides sometimes are used as immunogens.

[0166] Epitopes encompassed by the antigenic peptide are regions located on the surface of the polypeptide (e.g., hydrophilic regions) as well as regions with high antigenicity. For example, an Emini surface probability analysis of the human polypeptide sequence can be used to indicate the regions that have a particularly high probability of being localized to the surface of the polypeptide and are thus likely to constitute surface residues useful for targeting antibody production. The antibody may bind an epitope on any domain or region on polypeptides described herein.

[0167] Also, chimeric, humanized, and completely human antibodies are useful for applications which include repeated administration to subjects. Chimeric and humanized monoclonal antibodies, comprising both human and non-human portions, can be made using standard recombinant DNA techniques. Such chimeric and humanized monoclonal antibodies can be produced by recombinant DNA techniques known in the art, for example using methods described in Robinson et al. International Application No. PCT/US86/02269; Akira, et al. European Patent Application 184,187; Taniguchi, M., European Patent Application 171,496; Morrison et al. European Patent Application 173,494; Neuberger et al. PCT International Publication No. WO 86/01533; Cabilly et al. U.S. Pat. No. 4,816,567; Cabilly et al. European Patent Application 125,023; Better et al., Science 240: 1041-1043 (1988); Liu et al., Proc. Natl. Acad. Sci. USA 84: 3439-3443 (1987); Liu et al., J. Immunol. 139: 3521-3526 (1987); Sun et al., Proc. Natl. Acad. Sci. USA 84: 214-218 (1987); Nishimura et al., Canc. Res. 47: 999-1005 (1987); Wood et al., Nature 314: 446-449 (1985); and Shaw et al., J. Natl. Cancer Inst. 80: 1553-1559 (1988); Morrison, S. L., Science 229: 1202-1207 (1985); Oi et al., BioTechniques 4: 214 (1986); Winter U.S. Pat. No. 5,225,539; Jones et al., Nature 321: 552-525 (1986); Verhoeyan et al., Science 239: 1534; and Beidler et al., J. Immunol. 141: 4053-4060 (1988).

[0168] Completely human antibodies are particularly desirable for therapeutic treatment of human patients. Such antibodies can be produced using transgenic mice that are incapable of expressing endogenous immunoglobulin heavy and light chains genes, but which can express human heavy and light chain genes. See, for example, Lonberg and Huszar, Int. Rev. Immunol. 13: 65-93 (1995); and U.S. Pat. Nos. 5,625,126; 5,633,425; 5,569,825; 5,661,016; and 5,545,806. In addition, companies such as Abgenix, Inc. (Fremont, Calif.) and Medarex, Inc. (Princeton, N.J.), can be engaged to provide human antibodies directed against a selected antigen using technology similar to that described above. Completely human antibodies that recognize a selected epitope also can be generated using a technique referred to as “guided selection.” In this approach a selected non-human monoclonal antibody (e.g., a murine antibody) is used to guide the selection of a completely human antibody recognizing the same epitope. This technology is described for example by Jespers et al., Bio/Technology 12: 899-903 (1994).

[0169] Antibody can be a single chain antibody. A single chain antibody (scFV) can be engineered (see, e.g., Colcher et al., Ann. N Y Acad. Sci. 880: 263-80 (1999); and Reiter, Clin. Cancer Res. 2: 245-52 (1996)). Single chain antibodies can be dimerized or multimerized to generate multivalent antibodies having specificities for different epitopes of the same target polypeptide.

[0170] Antibodies also may be selected or modified so that they exhibit reduced or no ability to bind an Fc receptor. For example, an antibody may be an isotype or subtype, fragment or other mutant, which does not support binding to an Fc receptor (e.g., it has a mutagenized or deleted Fc receptor binding region).

[0171] Also, an antibody (or fragment thereof) may be conjugated to a therapeutic moiety such as a cytotoxin, a therapeutic agent or a radioactive metal ion. A cytotoxin or cytotoxic agent includes any agent that is detrimental to cells. Examples include taxol, cytochalasin B, gramicidin D, ethidium bromide, emetine, mitomycin, etoposide, tenoposide, vincristine, vinblastine, colchicin, doxorubicin, daunorubicin, dihydroxy anthracin dione, mitoxantrone, mithramycin, actinomycin D, 1 dehydrotestosterone, glucocorticoids, procaine, tetracaine, lidocaine, propranolol, and puromycin and analogs or homologs thereof. Therapeutic agents include, but are not limited to, antimetabolites (e.g., methotrexate, 6-mercaptopurine, 6-thioguanine, cytarabine, 5-fluorouracil decarbazine), alkylating agents (e.g., mechlorethamine, thiotepa chlorambucil, melphalan, carmustine (BCNU) and lomustine (CCNU), cyclophosphamide, busulfan, dibromomannitol, streptozotocin, mitomycin C, and cis-dichlorodiamine platinum (II) (DDP) cisplatin), anthracyclines (e.g., daunorubicin (formerly daunomycin) and doxorubicin), antibiotics (e.g., dactinomycin (formerly actinomycin), bleomycin, mithramycin, and anthramycin (AMC)), and anti-mitotic agents (e.g., vincristine and vinblastine).

[0172] Antibody conjugates can be used for modifying a given biological response. For example, the drug moiety may be a protein or polypeptide possessing a desired biological activity. Such proteins may include, for example, a toxin such as abrin, ricin A, pseudomonas exotoxin, or diphtheria toxin; a polypeptide such as tumor necrosis factor, ?-interferon, a-interferon, nerve growth factor, platelet derived growth factor, tissue plasminogen activator; or, biological response modifiers such as, for example, lymphokines, interleukin-1 (“IL-1”), interleukin-2 (“IL-2”), interleukin-6 (“1L-6”), granulocyte macrophage colony stimulating factor (“GM-CSF”), granulocyte colony stimulating factor (“G-CSF”), or other growth factors. Also, an antibody can be conjugated to a second antibody to form an antibody heteroconjugate as described by Segal in U.S. Pat. No. 4,676,980, for example.

[0173] An antibody (e.g., monoclonal antibody) can be used to isolate target polypeptides by standard techniques, such as affinity chromatography or immunoprecipitation. Moreover, an antibody can be used to detect a target polypeptide (e.g., in a cellular lysate or cell supernatant) in order to evaluate the abundance and pattern of expression of the polypeptide. Antibodies can be used diagnostically to monitor polypeptide levels in tissue as part of a clinical testing procedure, e.g., to determine the efficacy of a given treatment regimen. Detection can be facilitated by coupling (i.e., physically linking) the antibody to a detectable substance (i.e., antibody labeling). Examples of detectable substances include various enzymes, prosthetic groups, fluorescent materials, luminescent materials, bioluminescent materials, and radioactive materials. Examples of suitable enzymes include horseradish peroxidase, alkaline phosphatase, β-galactosidase, or acetylcholinesterase; examples of suitable prosthetic group complexes include streptavidin/biotin and avidin/biotin; examples of suitable fluorescent materials include umbelliferone, fluorescein, fluorescein isothiocyanate, rhodamine, dichlorotriazinylamine fluorescein, dansyl chloride or phycoerythrin; an example of a luminescent material includes luminol; examples of bioluminescent materials include luciferase, luciferin, and aequorin, and examples of suitable radioactive material include ¹²⁵I, ¹³¹I, ³⁵S or ³H. Also, an antibody can be utilized as a test molecule for determining whether it can treat breast cancer, and as a therapeutic for administration to a subject for treating breast cancer.

[0174] An antibody can be made by immunizing with a purified antigen, or a fragment thereof, e.g., a fragment described herein, a membrane associated antigen, tissues, e.g., crude tissue preparations, whole cells, preferably living cells, lysed cells, or cell fractions.

[0175] Included herein are antibodies which bind only a native polypeptide, only denatured or otherwise non-native polypeptide, or which bind both, as well as those having linear or conformational epitopes. Conformational epitopes sometimes can be identified by selecting antibodies that bind to native but not denatured polypeptide. Also featured are antibodies that specifically bind to a polypeptide variant associated with breast cancer.

[0176] Screening Assays

[0177] Featured herein are methods for identifying a candidate therapeutic for treating breast cancer. The methods comprise contacting a test molecule with a target molecule in a system. A “target molecule” as used herein refers to a nucleic acid of SEQ ID NO: 1-17, a substantially identical nucleic acid thereof, or a fragment thereof, and an encoded polypeptide of the foregoing. The method also comprises determining the presence or absence of an interaction between the test molecule and the target molecule, where the presence of an interaction between the test molecule and the nucleic acid or polypeptide identifies the test molecule as a candidate breast cancer therapeutic. The interaction between the test molecule and the target molecule may be quantified.

[0178] Test molecules and candidate therapeutics include, but are not limited to, compounds, antisense nucleic acids, siRNA molecules, ribozymes, polypeptides or proteins encoded by a ICAM, MAPK10, KIAA0861, NUMA1, GALE, DPF3 or LOC145197 nucleic acids, or a substantially identical sequence or fragment thereof, and immunotherapeutics (e.g., antibodies and HLA-presented polypeptide fragments). A test molecule or candidate therapeutic may act as a modulator of target molecule concentration or target molecule function in a system. A “modulator” may agonize (i.e., up-regulates) or antagonize (i.e., down-regulates) a target molecule concentration partially or completely in a system by affecting such cellular functions as DNA replication and/or DNA processing (e.g., DNA methylation or DNA repair), RNA transcription and/or RNA processing (e.g., removal of intronic sequences and/or translocation of spliced mRNA from the nucleus), polypeptide production (e.g., translation of the polypeptide from mRNA), and/or polypeptide post-translational modification (e.g., glycosylation, phosphorylation, and proteolysis of pro-polypeptides). A modulator may also agonize or antagonize a biological function of a target molecule partially or completely, where the function may include adopting a certain structural conformation, interacting with one or more binding partners, ligand binding, catalysis (e.g., phosphorylation, dephosphorylation, hydrolysis, methylation, and isomerization), and an effect upon a cellular event (e.g., effecting progression of breast cancer).

[0179] As used herein, the term “system” refers to a cell free in vitro environment and a cell-based environment such as a collection of cells, a tissue, an organ, or an organism. A system is “contacted” with a test molecule in a variety of manners, including adding molecules in solution and allowing them to interact with one another by diffusion, cell injection, and any administration routes in an animal. As used herein, the term “interaction” refers to an effect of a test molecule on test molecule, where the effect sometimes is binding between the test molecule and the target molecule, and sometimes is an observable change in cells, tissue, or organism.

[0180] There are many standard methods for detecting the presence or absence of an interaction between a test molecule and a target molecule. For example, titrametric, acidimetric, radiometric, NMR, monolayer, polarographic, spectrophotometric, fluorescent, and ESR assays probative of a target molecule interaction may be utilized.

[0181] In general, an interaction can be determined by labeling the test molecule and/or the ICAM, MAPK10, KIAA0861, NUMA1, GALE, DPF3 or LOC145197 molecule, where the label is covalently or non-covalently attached to the test molecule or ICAM, MAPK10, KIAA0861, NUMA1, GALE, DPF3 or LOC145197 molecule. The label is sometimes a radioactive molecule such as ¹²⁵I, ¹³¹I, ³⁵S or ³H, which can be detected by direct counting of radioemission or by scintillation counting. Also, enzymatic labels such as horseradish peroxidase, alkaline phosphatase, or luciferase may be utilized where the enzymatic label can be detected by determining conversion of an appropriate substrate to product. Also, presence or absence of an interaction can be determined without labeling. For example, a microphysiometer (e.g., Cytosensor) is an analytical instrument that measures the rate at which a cell acidifies its environment using a light-addressable potentiometric sensor (LAPS). Changes in this acidification rate can be used as an indication of an interaction between a test molecule and ICAM, MAPK10, KIAA0861, NUMA1, GALE, DPF3 or LOC145197 (McConnell, H. M. et al., Science 257: 1906-1912 (1992)).

[0182] In cell-based systems, cells typically include a ICAM, MAPK10, KIAA0861, NUMA1, GALE, DPF3 or LOC145197 nucleic acid or polypeptide or variants thereof and are often of mammalian origin, although the cell can be of any origin. Whole cells, cell homogenates, and cell fractions (e.g., cell membrane fractions) can be subjected to analysis. Where interactions between a test molecule with a ICAM, MAPK10, KIAA0861, NUMA1, GALE, DPF3 or LOC145197 polypeptide or variant thereof are monitored, soluble and/or membrane bound forms of the polypeptide or variant may be utilized. Where membrane-bound forms of the polypeptide are used, it may be desirable to utilize a solubilizing agent. Examples of such solubilizing agents include non-ionic detergents such as n-octylglucoside, n-dodecylglucoside, n-dodecylmaltoside, octanoyl-N-methylglucamide, decanoyl-N-methylglucamide, Triton® X-100, Triton® X-114, Thesit®, Isotridecypoly(ethylene glycol ether)ₙ, 3-[(3-cholamidopropyl)dimethylamminio]-1-propane sulfonate (CHAPS), 3-[(3-cholamidopropyl)dimethylamminio]-2-hydroxy-1-propane sulfonate (CHAPSO), or N-dodecyl-N,N-dimethyl-3-ammonio-1-propane sulfonate.

[0183] An interaction between two molecules also can be detected by monitoring fluorescence energy transfer (FET) (see, for example, Lakowicz et al., U.S. Pat. No. 5,631,169; Stavrianopoulos et al. U.S. Pat. No. 4,868,103). A fluorophore label on a first, “donor” molecule is selected such that its emitted fluorescent energy will be absorbed by a fluorescent label on a second, “acceptor” molecule, which in turn is able to fluoresce due to the absorbed energy. Alternately, the “donor” polypeptide molecule may simply utilize the natural fluorescent energy of tryptophan residues. Labels are chosen that emit different wavelengths of light, such that the “acceptor” molecule label may be differentiated from that of the “donor”. Since the efficiency of energy transfer between the labels is related to the distance separating the molecules, the spatial relationship between the molecules can be assessed. In a situation in which binding occurs between the molecules, the fluorescent emission of the “acceptor” molecule label in the assay should be maximal. A FET binding event can be conveniently measured through standard fluorometric detection means well known in the art (e.g., using a fluorimeter).

[0184] In another embodiment, determining the presence or absence of an interaction between a test molecule and a ICAM, MAPK10, KIAA0861, NUMA1, GALE, DPF3 or LOC145197 molecule can be effected by using real-time Biomolecular Interaction Analysis (BIA) (see, e.g., Sjolander & Urbaniczk, Anal. Chem. 63: 2338-2345 (1991) and Szabo et al., Curr. Opin. Struct. Biol. 5: 699-705 (1995)). “Surface plasmon resonance” or “BIA” detects biospecific interactions in real time, without labeling any of the interactants (e.g., BIAcore). Changes in the mass at the binding surface (indicative of a binding event) result in alterations of the refractive index of light near the surface (the optical phenomenon of surface plasmon resonance (SPR)), resulting in a detectable signal which can be used as an indication of real-time reactions between biological molecules.

[0185] In another embodiment, the ICAM, MAPK10, KIAA0861, NUMA1, GALE, DPF3 or LOC145197 molecule or test molecules are anchored to a solid phase. The ICAM, MAPK10, KIAA0861, NUMA1, GALE, DPF3 or LOC145197 molecule/test molecule complexes anchored to the solid phase can be detected at the end of the reaction. The target ICAM, MAPK10, KIAA0861, NUMA1, GALE, DPF3 or LOC145197 molecule is often anchored to a solid surface, and the test molecule, which is not anchored, can be labeled, either directly or indirectly, with detectable labels discussed herein.

[0186] It may be desirable to immobilize a ICAM, MAPK10, KIAA0861, NUMA1, GALE, DPF3 or LOC145197 molecule, an anti-ICAM, MAPK10, KIAA0861, NUMA1, GALE, DPF3 or LOC145197 antibody, or test molecules to facilitate separation of complexed from uncomplexed forms of ICAM, MAPK10, KIAA0861, NUMA1, GALE, DPF3 or LOC145197 molecules and test molecules, as well as to accommodate automation of the assay. Binding of a test molecule to a ICAM, MAPK10, KIAA0861, NUMA1, GALE, DPF3 or LOC145197 molecule can be accomplished in any vessel suitable for containing the reactants. Examples of such vessels include microtiter plates, test tubes, and micro-centrifuge tubes. In one embodiment, a fusion polypeptide can be provided which adds a domain that allows a ICAM, MAPK10, KIAA0861, NUMA1, GALE, DPF3 or LOC145197 molecule to be bound to a matrix. For example, glutathione-S-transferase/ICAM, MAPK10, KIAA0861, NUMA1, GALE, DPF3 or LOC145197 fusion polypeptides or glutathione-S-transferase/target fusion polypeptides can be adsorbed onto glutathione sepharose beads (Sigma Chemical, St. Louis, Mo.) or glutathione derivitized microtiter plates, which are then combined with the test compound or the test compound and either the non-adsorbed target polypeptide or ICAM, MAPK10, KIAA0861, NUMA1, GALE, DPF3 or LOC145197 polypeptide, and the mixture incubated under conditions conducive to complex formation (e.g., at physiological conditions for salt and pH). Following incubation, the beads or microtiter plate wells are washed to remove any unbound components, the matrix immobilized in the case of beads, complex determined either directly or indirectly, for example, as described above. Alternatively, the complexes can be dissociated from the matrix, and the level of ICAM, MAPK10, KIAA0861, NUMA1, GALE, DPF3 or LOC145197 binding or activity determined using standard techniques.

[0187] Other techniques for immobilizing a ICAM, MAPK10, KIAA0861, NUMA1, GALE, DPF3 or LOC145197 molecule on matrices include using biotin and streptavidin. For example, biotinylated ICAM, MAPK10, KIAA0861, NUMA1, GALE, DPF3 or LOC145197 polypeptide or target molecules can be prepared from biotin-NHS(N-hydroxy-succinimide) using techniques known in the art (e.g., biotinylation kit, Pierce Chemicals, Rockford, Ill.), and immobilized in the wells of streptavidin-coated 96 well plates (Pierce Chemical).

[0188] In order to conduct the assay, the non-immobilized component is added to the coated surface containing the anchored component. After the reaction is complete, unreacted components are removed (e.g., by washing) under conditions such that any complexes formed will remain immobilized on the solid surface. The detection of complexes anchored on the solid surface can be accomplished in a number of ways. Where the previously non-immobilized component is pre-labeled, the detection of label immobilized on the surface indicates that complexes were formed. Where the previously non-immobilized component is not pre-labeled, an indirect label can be used to detect complexes anchored on the surface; e.g., using a labeled antibody specific for the immobilized component (the antibody, in turn, can be directly labeled or indirectly labeled with, e.g., a labeled anti-Ig antibody).

[0189] In one embodiment, this assay is performed utilizing antibodies reactive with ICAM, MAPK10, KIAA0861, NUMA1, GALE, DPF3 or LOC145197 polypeptide or test molecules but which do not interfere with binding of the ICAM, MAPK10, KIAA0861, NUMA1, GALE, DPF3 or LOC145197 polypeptide to its test molecule. Such antibodies can be derivitized to the wells of the plate, and unbound target or ICAM, MAPK10, KIAA0861, NUMA1, GALE, DPF3 or LOC145197 polypeptide trapped in the wells by antibody conjugation. Methods for detecting such complexes, in addition to those described above for the GST-immobilized complexes, include immunodetection of complexes using antibodies reactive with the ICAM, MAPK10, KIAA0861, NUMA1, GALE, DPF3 or LOC145197 polypeptide or target molecule, as well as enzyme-linked assays which rely on detecting an enzymatic activity associated with the ICAM, MAPK10, KIAA0861, NUMA1, GALE, DPF3 or LOC145197 polypeptide or test molecule.

[0190] Alternatively, cell free assays can be conducted in a liquid phase. In such an assay, the reaction products are separated from unreacted components, by any of a number of standard techniques, including but not limited to: differential centrifugation (see, for example, Rivas, G., and Minton, A. P., Trends Biochem Sci August; 18(8): 284-7 (1993)); chromatography (gel filtration chromatography, ion-exchange chromatography); electrophoresis (see, e.g., Ausubel et al., eds. Current Protocols in Molecular Biology, J. Wiley: New York (1999)); and immunoprecipitation (see, for example, Ausubel, F. et al., eds. Current Protocols in Molecular Biology, J. Wiley: New York (1999)). Such resins and chromatographic techniques are known to one skilled in the art (see, e.g., Heegaard, J. Mol. Recognit. Winter; 11(1-6): 141-8 (1998); Hage & Tweed, J. Chromatogr. B Biomed. Sci. Appl. October 10; 699 (1-2): 499-525 (1997)). Further, fluorescence energy transfer may also be conveniently utilized, as described herein, to detect binding without further purification of the complex from solution.

[0191] In another embodiment, modulators of ICAM, MAPK10, KIAA0861, NUMA1, GALE, DPF3 or LOC145197 expression are identified. For example, a cell or cell free mixture is contacted with a candidate compound and the expression of ICAM, MAPK10, KIAA0861, NUMA1, GALE, DPF3 or LOC145197 mRNA or polypeptide evaluated relative to the level of expression of ICAM, MAPK10, KIAA0861, NUMA1, GALE, DPF3 or LOC145197 mRNA or polypeptide in the absence of the candidate compound. When expression of ICAM, MAPK10, KIAA0861, NUMA1, GALE, DPF3 or LOC145197 mRNA or polypeptide is greater in the presence of the candidate compound than in its absence, the candidate compound is identified as a stimulator of ICAM, MAPK10, KIAA0861, NUMA1, GALE, DPF3 or LOC145197 mRNA or polypeptide expression. Alternatively, when expression of ICAM, MAPK10, KIAA0861, NUMA1, GALE, DPF3 or LOC145197 mRNA or polypeptide is less (statistically significantly less) in the presence of the candidate compound than in its absence, the candidate compound is identified as an inhibitor of ICAM, MAPK10, KIAA0861, NUMA1, GALE, DPF3 or LOC145197 mRNA or polypeptide expression. The level of ICAM, MAPK10, KIAA0861, NUMA1, GALE, DPF3 or LOC145197 mRNA or polypeptide expression can be determined by methods described herein for detecting ICAM, MAPK10, KIAA0861, NUMA1, GALE, DPF3 or LOC145197 mRNA or polypeptide.

[0192] In another embodiment, binding partners that interact with a ICAM, MAPK1, KIAA0861, NUMA1, GALE, DPF3 or LOC145197 molecule are detected. The ICAM, MAPK10, KIAA0861, NUMA1, GALE, DPF3 or LOC145197 molecules can interact with one or more cellular or extracellular macromolecules, such as polypeptides, in vivo, and these molecules that interact with ICAM, MAPK10, KIAA0861, NUMA1, GALE, DPF3 or LOC145197 molecules are referred to herein as “binding partners.” Molecules that disrupt such interactions can be useful in regulating the activity of the target gene product. Such molecules can include, but are not limited to molecules such as antibodies, peptides, and small molecules. Target genes/products for use in this embodiment often are the ICAM, MAPK10, KIAA0861, NUMA1, GALE, DPF3 or LOC145197 genes herein identified. In an alternative embodiment, provided is a method for determining the ability of the test compound to modulate the activity of a ICAM, MAPK10, KIAA0861, NUMA1, GALE, DPF3 or LOC145197 polypeptide through modulation of the activity of a downstream effector of a ICAM, MAPK10, KIAA0861, NUMA1, GALE, DPF3 or LOC145197 target molecule. For example, the activity of the effector molecule on an appropriate target can be determined, or the binding of the effector to an appropriate target can be determined, as previously described.

[0193] To identify compounds that interfere with the interaction between the target gene product and its cellular or extracellular binding partner(s), e.g., a substrate, a reaction mixture containing the target gene product and the binding partner is prepared, under conditions and for a time sufficient, to allow the two products to form complex. In order to test an inhibitory agent, the reaction mixture is provided in the presence and absence of the test compound. The test compound can be initially included in the reaction mixture, or can be added at a time subsequent to the addition of the target gene and its cellular or extracellular binding partner. Control reaction mixtures are incubated without the test compound or with a placebo. The formation of any complexes between the target gene product and the cellular or extracellular binding partner is then detected. The formation of a complex in the control reaction, but not in the reaction mixture containing the test compound, indicates that the compound interferes with the interaction of the target gene product and the interactive binding partner. Additionally, complex formation within reaction mixtures containing the test compound and normal target gene product can also be compared to complex formation within reaction mixtures containing the test compound and mutant target gene product. This comparison can be important in those cases where it is desirable to identify compounds that disrupt interactions of mutant but not normal target gene products. Examples of ICAM1 inhibitors are Actimid and Bortezomib, and U.S. Pat. No. 6,436,403 describes a conjugate between ICAM1 and a virus for ICAM1 delivery. Examples of MAPK10 and JUNK modulators are beta arrestin (ARBB2), which is an agonist, CC-401 (Celgene), which is an inhibitor, and other modulators disclosed in WO0246184A1, WO02083667A2, WO02079197A1, WO0112621A1, WO04005283A1, WO0210137A2, WO0112609A1, WO03099221A2, WO02066450A2, WO03102151A2, U.S. 20020160397A1. Examples of MAPK1 screening methods are disclosed in U.S. Pat. No. 6,610,505.

[0194] These assays can be conducted in a heterogeneous or homogeneous format. Heterogeneous assays involve anchoring either the target gene product or the binding partner onto a solid phase, and detecting complexes anchored on the solid phase at the end of the reaction. In homogeneous assays, the entire reaction is carried out in a liquid phase. In either approach, the order of addition of reactants can be varied to obtain different information about the compounds being tested. For example, test compounds that interfere with the interaction between the target gene products and the binding partners, e.g., by competition, can be identified by conducting the reaction in the presence of the test substance. Alternatively, test compounds that disrupt preformed complexes, e.g., compounds with higher binding constants that displace one of the components from the complex, can be tested by adding the test compound to the reaction mixture after complexes have been formed. The various formats are briefly described below.

[0195] In a heterogeneous assay system, either the target gene product or the interactive cellular or extracellular binding partner, is anchored onto a solid surface (e.g., a microtiter plate), while the non-anchored species is labeled, either directly or indirectly. The anchored species can be immobilized by non-covalent or covalent attachments. Alternatively, an immobilized antibody specific for the species to be anchored can be used to anchor the species to the solid surface.

[0196] In order to conduct the assay, the partner of the immobilized species is exposed to the coated surface with or without the test compound. After the reaction is complete, unreacted components are removed (e.g., by washing) and any complexes formed will remain immobilized on the solid surface. Where the non-immobilized species is pre-labeled, the detection of label immobilized on the surface indicates that complexes were formed. Where the non-immobilized species is not pre-labeled, an indirect label can be used to detect complexes anchored on the surface; e.g., using a labeled antibody specific for the initially non-immobilized species (the antibody, in turn, can be directly labeled or indirectly labeled with, e.g., a labeled anti-Ig antibody). Depending upon the order of addition of reaction components, test compounds that inhibit complex formation or that disrupt preformed complexes can be detected.

[0197] Alternatively, the reaction can be conducted in a liquid phase in the presence or absence of the test compound, the reaction products separated from unreacted components, and complexes detected; e.g., using an immobilized antibody specific for one of the binding components to anchor any complexes formed in solution, and a labeled antibody specific for the other partner to detect anchored complexes. Again, depending upon the order of addition of reactants to the liquid phase, test compounds that inhibit complex or that disrupt preformed complexes can be identified.

[0198] In an alternate embodiment, a homogeneous assay can be used. For example, a preformed complex of the target gene product and the interactive cellular or extracellular binding partner product is prepared in that either the target gene products or their binding partners are labeled, but the signal generated by the label is quenched due to complex formation (see, e.g., U.S. Pat. No. 4,109,496 that utilizes this approach for immunoassays). The addition of a test substance that competes with and displaces one of the species from the preformed complex will result in the generation of a signal above background. In this way, test substances that disrupt target gene product-binding partner interaction can be identified.

[0199] Also, binding partners of ICAM, MAPK10, KIAA0861, NUMA1, GALE, DPF3 or LOC145197 molecules can be identified in a two-hybrid assay or three-hybrid assay (see, e.g., U.S. Pat. No. 5,283,317; Zervos et al., Cell 72: 223-232 (1993); Madura et al., J. Biol. Chem. 268: 12046-12054 (1993); Bartel et al., Biotechniques 14: 920-924 (1993); Iwabuchi et al., Oncogene 8: 1693-1696 (1993); and Brent WO94/10300), to identify other polypeptides, which bind to or interact with ICAM, MAPK10, KIAA0861, NUMA1, GALE, DPF3 or LOC145197 (“ICAM, MAPK10, KIAA0861, NUAM1, GALE, DPF3 or LOC145197-binding polypeptides” or “ICAM, MAPK10, KIAA0861, NUMA1, GALE, DPF3 or LOC145197-bp”) and are involved in ICAM, MAPK10, KIAA0861, NUMA1, GALE, DPF3 or LOC145197 activity. Such ICAM, MAPK10, KIAA0861, NUMA1, GALE, DPF3 or LOC145197-bps can be activators or inhibitors of signals by the ICAM, MAPK10, KIAA0861, NUMA1, GALE, DPF3 or LOC145197 polypeptides or ICAM, MAPK10, KIAA0861, NUMA1, GALE, DPF3 or LOC145197 targets as, for example, downstream elements of a ICAM, MAPK10, KIAA0861, NUMA1, GALE, DPF3 or LOC145197-mediated signaling pathway.

[0200] A two-hybrid system is based on the modular nature of most transcription factors, which consist of separable DNA-binding and activation domains. Briefly, the assay utilizes two different DNA constructs. In one construct, the gene that codes for a ICAM, MAPK10, KIAA0861, NUMA1, GALE, DPF3 or LOC145197 polypeptide is fused to a gene encoding the DNA binding domain of a known transcription factor (e.g., GAL-4). In the other construct, a DNA sequence, from a library of DNA sequences, that encodes an unidentified polypeptide (“prey” or “sample”) is fused to a gene that codes for the activation domain of the known transcription factor. (Alternatively the: ICAM, MAPK10, KIAA0861, NUMA1, GALE, DPF3 or LOC145197 polypeptide can be the fused to the activator domain.) If the “bait” and the “prey” polypeptides are able to interact, in vivo, forming a ICAM, MAPK10, KIAA0861, NUMA1, GALE, DPF3 or LOC145197-dependent complex, the DNA-binding and activation domains of the transcription factor are brought into close proximity. This proximity allows transcription of a reporter gene (e.g., LacZ) which is operably linked to a transcriptional regulatory site responsive to the transcription factor. Expression of the reporter gene can be detected and cell colonies containing the functional transcription factor can be isolated and used to obtain the cloned gene which encodes the polypeptide which interacts with the ICAM, MAPK10, KIAA0861, NUMA1, GALE, DPF3 or LOC145197 polypeptide.

[0201] Candidate therapeutics for treating breast cancer are identified from a group of test molecules that interact with a ICAM, MAPK10, KIAA0861, NUMA1, GALE, DPF3 or LOC145197 nucleic acid or polypeptide. Test molecules are normally ranked according to the degree with which they interact or modulate (e.g., agonize or antagonize) DNA replication and/or processing, RNA transcription and/or processing, polypeptide production and/or processing, and/or function of ICAM, MAPK10, KIAA0861, NUMA1, GALE, DPF3 or LOC145197 molecules, for example, and then top ranking modulators are selected. In a preferred embodiment, the candidate therapeutic (i.e., test molecule) acts as a ICAM, MAPK10, KIAA0861, NUAM1, GALE, DPF3 or LOC145197 antagonist. Also, pharmacogenomic information described herein can determine the rank of a modulator. Candidate therapeutics typically are formulated for administration to a subject.

[0202] Therapeutic Treatments

[0203] Formulations or pharmaceutical compositions typically include in combination with a pharmaceutically acceptable carrier, a compound, an antisense nucleic acid, a ribozyme, an antibody, a binding partner that interacts with a ICAM, MAPK10, KIAA0861, NUMA1, GALE, DPF3 or LOC145197 polypeptide, a ICAM, MAPK10, KIAA0861, NUMA1, GALE, DPF3 or LOC145197 nucleic acid, or a fragment thereof. The formulated molecule may be one that is identified by a screening method described above. As used herein, the term “pharmaceutically acceptable carrier” includes solvents, dispersion media, coatings, antibacterial and antifungal agents, isotonic and absorption delaying agents, and the like, compatible with pharmaceutical administration. Supplementary active compounds can also be incorporated into the compositions.

[0204] A pharmaceutical composition is formulated to be compatible with its intended route of administration. Examples of routes of administration include parenteral, e.g., intravenous, intradermal, subcutaneous, oral (e.g., inhalation), transdermal (topical), transmucosal, and rectal administration. Solutions or suspensions used for parenteral, intradermal, or subcutaneous application can include the following components: a sterile diluent such as water for injection, saline solution, fixed oils, polyethylene glycols, glycerin, propylene glycol or other synthetic solvents; antibacterial agents such as benzyl alcohol or methyl parabens; antioxidants such as ascorbic acid or sodium bisulfite; chelating agents such as ethylenediaminetetraacetic acid; buffers such as acetates, citrates or phosphates and agents for the adjustment of tonicity such as sodium chloride or dextrose. pH can be adjusted with acids or bases, such as hydrochloric acid or sodium hydroxide. The parenteral preparation can be enclosed in ampoules, disposable syringes or multiple dose vials made of glass or plastic.

[0205] Oral compositions generally include an inert diluent or an edible carrier. For the purpose of oral therapeutic administration, the active compound can be incorporated with excipients and used in the form of tablets, troches, or capsules, e.g., gelatin capsules. Oral compositions can also be prepared using a fluid carrier for use as a mouthwash. Pharmaceutically compatible binding agents, and/or adjuvant materials can be included as part of the composition. The tablets, pills, capsules, troches and the like can contain any of the following ingredients, or compounds of a similar nature: a binder such as microcrystalline cellulose, gum tragacanth or gelatin; an excipient such as starch or lactose, a disintegrating agent such as alginic acid, Primogel, or corn starch; a lubricant such as magnesium stearate or Sterotes; a glidant such as colloidal silicon dioxide; a sweetening agent such as sucrose or saccharin; or a flavoring agent such as peppermint, methyl salicylate, or orange flavoring.

[0206] Pharmaceutical compositions suitable for injectable use include sterile aqueous solutions (where water soluble) or dispersions and sterile powders for the extemporaneous preparation of sterile injectable solutions or dispersion. For intravenous administration, suitable carriers include physiological saline, bacteriostatic water, Cremophor E™ (BASF, Parsippany, N.J.) or phosphate buffered saline (PBS). In all cases, the composition must be sterile and should be fluid to the extent that easy syringability exists. It should be stable under the conditions of manufacture and storage and must be preserved against the contaminating action of microorganisms such as bacteria and fungi. The carrier can be a solvent or dispersion medium containing, for example, water, ethanol, polyol (for example, glycerol, propylene glycol, and liquid polyethylene glycol, and the like), and suitable mixtures thereof. The proper fluidity can be maintained, for example, by the use of a coating such as lecithin, by the maintenance of the required particle size in the case of dispersion and by the use of surfactants. Prevention of the action of microorganisms can be achieved by various antibacterial and antifungal agents, for example, parabens, chlorobutanol, phenol, ascorbic acid, thimerosal, and the like. In many cases, isotonic agents, for example, sugars, polyalcohols such as mannitol, sorbitol, sodium chloride sometimes are included in the composition. Prolonged absorption of the injectable compositions can be brought about by including in the composition an agent which delays absorption, for example, aluminum monostearate and gelatin.

[0207] Sterile injectable solutions can be prepared by incorporating the active compound in the required amount in an appropriate solvent with one or a combination of ingredients enumerated above, as required, followed by filtered sterilization. Generally, dispersions are prepared by incorporating the active compound into a sterile vehicle which contains a basic dispersion medium and the required other ingredients from those enumerated above. In the case of sterile powders for the preparation of sterile injectable solutions, methods of preparation often utilized are vacuum drying and freeze-drying which yields a powder of the active ingredient plus any additional desired ingredient from a previously sterile-filtered solution thereof.

[0208] For administration by inhalation, the compounds are delivered in the form of an aerosol spray from pressured container or dispenser which contains a suitable propellant, e.g., a gas such as carbon dioxide, or a nebulizer.

[0209] Systemic administration can also be by transmucosal or transdermal means. For transmucosal or transdermal administration, penetrants appropriate to the barrier to be permeated are used in the formulation. Such penetrants are generally known in the art, and include, for example, for transmucosal administration, detergents, bile salts, and fusidic acid derivatives. Transmucosal administration can be accomplished through the use of nasal sprays or suppositories. For transdermal administration, the active compounds are formulated into ointments, salves, gels, or creams as generally known in the art. Molecules can also be prepared in the form of suppositories (e.g., with conventional suppository bases such as cocoa butter and other glycerides) or retention enemas for rectal delivery.

[0210] In one embodiment, active molecules are prepared with carriers that will protect the compound against rapid elimination from the body, such as a controlled release formulation, including implants and microencapsulated delivery systems. Biodegradable, biocompatible polymers can be used, such as ethylene vinyl acetate, polyanhydrides, polyglycolic acid, collagen, polyorthoesters, and polylactic acid. Methods for preparation of such formulations will be apparent to those skilled in the art. Materials can also be obtained commercially from Alza Corporation and Nova Pharmaceuticals, Inc. Liposomal suspensions (including liposomes targeted to infected cells with monoclonal antibodies to viral antigens) can also be used as pharmaceutically acceptable carriers. These can be prepared according to methods known to those skilled in the art, for example, as described in U.S. Pat. No. 4,522,811.

[0211] It is advantageous to formulate oral or parenteral compositions in dosage unit form for ease of administration and uniformity of dosage. Dosage unit form as used herein refers to physically discrete units suited as unitary dosages for the subject to be treated; each unit containing a predetermined quantity of active compound calculated to produce the desired therapeutic effect in association with the required pharmaceutical carrier.

[0212] Toxicity and therapeutic efficacy of such compounds can be determined by standard pharmaceutical procedures in cell cultures or experimental animals, e.g., for determining the LD₅₀ (the dose lethal to 50% of the population) and the ED₅₀ (the dose therapeutically effective in 50% of the population). The dose ratio between toxic and therapeutic effects is the therapeutic index and it can be expressed as the ratio LD₅₀/ED₅₀. Molecules which exhibit high therapeutic indices often are utilized. While molecules that exhibit toxic side effects may be used, care should be taken to design a delivery system that targets such compounds to the site of affected tissue in order to minimize potential damage to uninfected cells and, thereby, reduce side effects.

[0213] The data obtained from the cell culture assays and animal studies can be used in formulating a range of dosage for use in humans. The dosage of such molecules often lies within a range of circulating concentrations that include the ED₅₀ with little or no toxicity. The dosage may vary within this range depending upon the dosage form employed and the route of administration utilized. For any molecules used in the methods described herein, the therapeutically effective dose can be estimated initially from cell culture assays. A dose may be formulated in animal models to achieve a circulating plasma concentration range that includes the IC₅₀ (i.e., the concentration of the test compound which achieves a half-maximal inhibition of symptoms) as determined in cell culture. Such information can be used to more accurately determine useful doses in humans. Levels in plasma may be measured, for example, by high performance liquid chromatography.

[0214] As defined herein, a therapeutically effective amount of protein or polypeptide (i.e., an effective dosage) ranges from about 0.001 to 30 mg/kg body weight, sometimes about 0.01 to 25 mg/kg body weight, often about 0.1 to 20 mg/kg body weight, and more often about 1 to 10 mg/kg, 2 to 9 mg/kg, 3 to 8 mg/kg, 4 to 7 mg/kg, or 5 to 6 mg/kg body weight. The protein or polypeptide can be administered one time per week for between about 1 to 10 weeks, sometimes between 2 to 8 weeks, often between about 3 to 7 weeks, and more often for about 4, 5, or 6 weeks. The skilled artisan will appreciate that certain factors may influence the dosage and timing required to effectively treat a subject, including but not limited to the severity of the disease or disorder, previous treatments, the general health and/or age of the subject, and other diseases present. Moreover, treatment of a subject with a therapeutically effective amount of a protein, polypeptide, or antibody can include a single treatment, or sometimes can include a series of treatments.

[0215] With regard to polypeptide formulations, featured herein is a method for treating breast cancer in a subject, which comprises contacting one or more cells in the subject with a first ICAM, MAPK10, KIAA0861, NUMA1, GALE, DPF3 or LOC145197 polypeptide, where the subject comprises a second ICAM, MAPK10, KIAA0861, NUMA1, GALE, DPF3 or LOC145197 polypeptide having one or more polymorphic variations associated with cancer, and where the first polypeptide comprises fewer polymorphic variations associated with cancer than the second polypeptide. The first and second polypeptides are encoded by a nucleic acid which comprises a nucleotide sequence selected from the group consisting of the nucleotide sequence of SEQ ID NO: 1-17; a nucleotide sequence which encodes a polypeptide consisting of an amino acid sequence encoded by a nucleotide sequence of SEQ ID NO: 1-17; a nucleotide sequence which encodes a polypeptide that is 90% or more identical to an amino acid sequence encoded by a nucleotide sequence of SEQ ID NO: 1-17 and a nucleotide sequence 90% or more identical to a nucleotide sequence of SEQ ID NO: 1-17. The subject is often a human.

[0216] For antibodies, a dosage of 0.1 mg/kg of body weight (generally 10 mg/kg to 20 mg/kg) is often utilized. If the antibody is to act in the brain, a dosage of 50 mg/kg to 100 mg/kg is often appropriate. Generally, partially human antibodies and fully human antibodies have a longer half-life within the human body than other antibodies. Accordingly, lower dosages and less frequent administration is often possible. Modifications such as lipidation can be used to stabilize antibodies and to enhance uptake and tissue penetration (e.g., into the brain). A method for lipidation of antibodies is described by Cruikshank et al., J. Acquired Immune Deficiency Syndromes and Human Retrovirology 14: 193 (1997).

[0217] Antibody conjugates can be used for modifying a given biological response, the drug moiety is not to be construed as limited to classical chemical therapeutic agents. For example, the drug moiety may be a protein or polypeptide possessing a desired biological activity. Such proteins may include, for example, a toxin such as abrin, ricin A, pseudomonas exotoxin, or diphtheria toxin; a polypeptide such as tumor necrosis factor, .alpha.-interferon, .beta.-interferon, nerve growth factor, platelet derived growth factor, tissue plasminogen activator; or, biological response modifiers such as, for example, lymphokines, interleukin-1 (“IL-1”), interleukin-2 (“IL-2”), interleukin-6 (“IL-6”), granulocyte macrophage colony stimulating factor (“GM-CSF”), granulocyte colony stimulating factor (“G-CSF”), or other growth factors. Alternatively, an antibody can be conjugated to a second antibody to form an antibody heteroconjugate as described by Segal in U.S. Pat. No. 4,676,980.

[0218] For compounds, exemplary doses include milligram or microgram amounts of the compound per kilogram of subject or sample weight, for example, about 1 microgram per kilogram to about 500 milligrams per kilogram, about 100 micrograms per kilogram to about 5 milligrams per kilogram, or about 1 microgram per kilogram to about 50 micrograms per kilogram. It is understood that appropriate doses of a small molecule depend upon the potency of the small molecule with respect to the expression or activity to be modulated. When one or more of these small molecules is to be administered to an animal (e.g., a human) in order to modulate expression or activity of a polypeptide or nucleic acid described herein, a physician, veterinarian, or researcher may, for example, prescribe a relatively low dose at first, subsequently increasing the dose until an appropriate response is obtained. In addition, it is understood that the specific dose level for any particular animal subject will depend upon a variety of factors including the activity of the specific compound employed, the age, body weight, general health, gender, and diet of the subject, the time of administration, the route of administration, the rate of excretion, any drug combination, and the degree of expression or activity to be modulated.

[0219] ICAM, MAPK10, KIAA0861, NUMA1, GALE, DPF3 or LOC145197 nucleic acid molecules can be inserted into vectors and used in gene therapy methods for treating breast cancer. Featured herein is a method for treating breast cancer in a subject, which comprises contacting one or more cells in the subject with a first ICAM, MAPK10, KIAA0861, NUMA1, GALE, DPF3 or LOC145197 nucleic acid, where genomic DNA in the subject comprises a second ICAM, MAPK10, KIAA0861, NUMA1, GALE, DPF3 or LOC145197 nucleic acid comprising one or more polymorphic variations associated with breast cancer, and where the first nucleic acid comprises fewer polymorphic variations associated with breast cancer. The first and second nucleic acids typically comprise a nucleotide sequence selected from the group consisting of the nucleotide sequence of SEQ ID NO: 1-7; a nucleotide sequence which encodes a polypeptide consisting of an amino acid sequence encoded by a nucleotide sequence in SEQ ID NO: 1-7; a nucleotide sequence that is 90% or more identical to the nucleotide sequence of SEQ ID NO: 1-7, and a nucleotide sequence which encodes a polypeptide that is 90% or more identical to an amino acid sequence encoded by a nucleotide sequence in SEQ ID NO: 1-7. The subject often is a human.

[0220] Gene therapy vectors can be delivered to a subject by, for example, intravenous injection, local administration (see U.S. Pat. No. 5,328,470) or by stereotactic injection (see e.g., Chen et al., (1994) Proc. Natl. Acad. Sci. USA 91: 3054-3057). Pharmaceutical preparations of gene therapy vectors can include a gene therapy vector in an acceptable diluent, or can comprise a slow release matrix in which the gene delivery vehicle is imbedded. Alternatively, where the complete gene delivery vector can be produced intact from recombinant cells (e.g., retroviral vectors) the pharmaceutical preparation can include one or more cells which produce the gene delivery system. Examples of gene delivery vectors are described herein.

[0221] Pharmaceutical compositions can be included in a container, pack, or dispenser together with instructions for administration.

[0222] Pharmaceutical compositions of active ingredients can be administered by any of the paths described herein for therapeutic and prophylactic methods for treating breast cancer. With regard to both prophylactic and therapeutic methods of treatment, such treatments may be specifically tailored or modified, based on knowledge obtained from pharmacogenomic analyses described herein. As used herein, the term “treatment” is defined as the application or administration of a therapeutic agent to a patient, or application or administration of a therapeutic agent to an isolated tissue or cell line from a patient, who has a disease, a symptom of disease or a predisposition toward a disease, with the purpose to cure, heal, alleviate, relieve, alter, remedy, ameliorate, improve or affect the disease, the symptoms of disease or the predisposition toward disease. A therapeutic agent includes, but is not limited to, small molecules, peptides, antibodies, ribozymes and antisense oligonucleotides.

[0223] Administration of a prophylactic agent can occur prior to the manifestation of symptoms characteristic of the ICAM, MAPK10, KIAA0861, NUMA1, GALE, DPF3 or LOC145197 aberrance, such that a disease or disorder is prevented or, alternatively, delayed in its progression. Depending on the type of ICAM, MAPK10, KIAA0861, NUMA1, GALE, DPF3 or LOC145197 aberrance, for example, a ICAM, MAPK10, KIAA0861, NUMA1, GALE, DPF3 or LOC145197 molecule, ICAM, MAPK10, KIAA0861, NUMA1, GALE, DPF3 or LOC145197 agonist, or ICAM, MAPK10, KIAA0861, NUMA1, GALE, DPF3 or LOC145197 antagonist agent can be used for treating the subject. The appropriate agent can be determined based on screening assays described herein.

[0224] As discussed, successful treatment of ICAM, MAPK10, KIAA0861, NUMA1, GALE, DPF3 or LOC145197 disorders can be brought about by techniques that serve to inhibit the expression or activity of target gene products. For example, compounds (e.g., an agent identified using an assays described above) that exhibit negative modulatory activity can be used to prevent and/or treat breast cancer. Such molecules can include, but are not limited to peptides, phosphopeptides, small organic or inorganic molecules, or antibodies (including, for example, polyclonal, monoclonal, humanized, anti-idiotypic, chimeric or single chain antibodies, and FAb, F(ab′)2 and FAb expression library fragments, scFV molecules, and epitope-binding fragments thereof).

[0225] Further, antisense and ribozyme molecules that inhibit expression of the target gene can also be used to reduce the level of target gene expression, thus effectively reducing the level of target gene activity. Still further, triple helix molecules can be utilized in reducing the level of target gene activity. Antisense, ribozyme and triple helix molecules are discussed above.

[0226] It is possible that the use of antisense, ribozyme, and/or triple helix molecules to reduce or inhibit mutant gene expression can also reduce or inhibit the transcription (triple helix) and/or translation (antisense, ribozyme) of mRNA produced by normal target gene alleles, such that the concentration of normal target gene product present can be lower than is necessary for a normal phenotype. In such cases, nucleic acid molecules that encode and express target gene polypeptides exhibiting normal target gene activity can be introduced into cells via gene therapy method. Alternatively, in instances where the target gene encodes an extracellular polypeptide, normal target gene polypeptide often is co-administered into the cell or tissue to maintain the requisite level of cellular or tissue target gene activity.

[0227] Another method by which nucleic acid molecules may be utilized in treating or preventing a disease characterized by ICAM, MAPK10, KIAA0861, NUMA1, GALE, DPF3 or LOC145197 expression is through the use of aptamer molecules specific for ICAM, MAPK10, KIAA0861, NUMA1, GALE, DPF3 or LOC145197 polypeptide. Aptamers are nucleic acid molecules having a tertiary structure which permits them to specifically bind to polypeptide ligands (see, e.g., Osborne, et al., Curr. Opin. Chem. Biol. 1(1): 5-9 (1997); and Patel, D. J., Curr. Opin. Chem. Biol. June; 1(1): 32-46 (1997)). Since nucleic acid molecules may in many cases be more conveniently introduced into target cells than therapeutic polypeptide molecules may be, aptamers offer a method by which ICAM, MAPK10, KIAA0861, NUMA1, GALE, DPF3 or LOC145197 polypeptide activity may be specifically decreased without the introduction of drugs or other molecules which may have pluripotent effects.

[0228] Antibodies can be generated that are both specific for target gene product and that reduce target gene product activity. Such antibodies may, therefore, by administered in instances whereby negative modulatory techniques are appropriate for the treatment of ICAM, MAPK10, KIAA0861, NUMA1, GALE, DPF3 or LOC145197 disorders. For a description of antibodies, see the Antibody section above.

[0229] In circumstances where injection of an animal or a human subject with a ICAM, MAPK10, KIAA0861, NUMA1; GALE, DPF3 or LOC145197 polypeptide or epitope for stimulating antibody production is harmful to the subject, it is possible to generate an immune response against ICAM, MAPK10, KIAA0861, NUMA1, GALE, DPF3 or LOC145197 through the use of anti-idiotypic antibodies (see, for example, Herlyn, D., Ann. Med.; 31(1): 66-78 (1999); and Bhattacharya-Chatterjee & Foon, Cancer Treat. Res.; 94: 51-68 (1998)). If an anti-idiotypic antibody is introduced into a mammal or human subject, it should stimulate the production of anti-anti-idiotypic antibodies, which should be specific to the ICAM, MAPK10, KIAA0861, NUMA1, GALE, DPF3 or LOC145197 polypeptide. Vaccines directed to a disease characterized by ICAM, MAPK10, KIAA0861, NUMA1, GALE, DPF3 or LOC145197 expression may also be generated in this fashion.

[0230] In instances where the target antigen is intracellular and whole antibodies are used, internalizing antibodies may be utilized. Lipofectin or liposomes can be used to deliver the antibody or a fragment of the Fab region that binds to the target antigen into cells. Where fragments of the antibody are used, the smallest inhibitory fragment that binds to the target antigen often is utilized. For example, peptides having an amino acid sequence corresponding to the Fv region of the antibody can be used. Alternatively, single chain neutralizing antibodies that bind to intracellular target antigens can also be administered. Such single chain antibodies can be administered, for example, by expressing nucleotide sequences encoding single-chain antibodies within the target cell population (see e.g., Marasco et al., Proc. Natl. Acad. Sci. USA 90: 7889-7893 (1993)).

[0231] ICAM, MAPK10, KIAA0861, NUMA1, GALE, DPF3 or LOC145197 molecules and compounds that inhibit target gene expression, synthesis and/or activity can be administered to a patient at therapeutically effective doses to prevent, treat or ameliorate ICAM, MAPK10, KIAA0861, NUMA1, GALE, DPF3 or LOC145197 disorders. A therapeutically effective dose refers to that amount of the compound sufficient to result in amelioration of symptoms of the disorders.

[0232] Toxicity and therapeutic efficacy of such compounds can be determined by standard pharmaceutical procedures in cell cultures or experimental animals, e.g., for determining the LD₅₀ (the dose lethal to 50% of the population) and the ED₅₀ (the dose therapeutically effective in 50% of the population). The dose ratio between toxic and therapeutic effects is the therapeutic index and it can be expressed as the ratio LD₅₀/ED₅₀. Compounds that exhibit large therapeutic indices often are utilized. While compounds that exhibit toxic side effects can be used, care should be taken to design a delivery system that targets such compounds to the site of affected tissue in order to minimize potential damage to uninfected cells and, thereby, reduce side effects.

[0233] Data obtained from cell culture assays and animal studies can be used in formulating a range of dosage for use in humans. The dosage of such compounds often lies within a range of circulating concentrations that include the ED₅₀ with little or no toxicity. The dosage can vary within this range depending upon the dosage form employed and the route of administration utilized. For any compound used in a method described herein, the therapeutically effective dose can be estimated initially from cell culture assays. A dose can be formulated in animal models to achieve a circulating plasma concentration range that includes the IC₅₀ (i.e., the concentration of the test compound that achieves a half-maximal inhibition of symptoms) as determined in cell culture. Such information can be used to more accurately determine useful doses in humans. Levels in plasma can be measured, for example, by high performance liquid chromatography.

[0234] Another example of effective dose determination for an individual is the ability to directly assay levels of “free” and “bound” compound in the serum of the test subject. Such assays may utilize antibody mimics and/or “biosensors” that have been created through molecular imprinting techniques.

[0235] The compound which is able to modulate ICAM, MAPK10, KIAA0861, NUMA1, GALE, DPF3 or LOC145197 activity is used as a template, or “imprinting molecule”, to spatially organize polymerizable monomers prior to their polymerization with catalytic reagents. The subsequent removal of the imprinted molecule leaves a polymer matrix which contains a repeated “negative image” of the compound and is able to selectively rebind the molecule under biological assay conditions. A detailed review of this technique can be seen in Ansell et al., Current Opinion in Biotechnology 7: 89-94 (1996) and in Shea, Trends in Polymer Science 2: 166-173 (1994). Such “imprinted” affinity matrixes are amenable to ligand-binding assays, whereby the immobilized monoclonal antibody component is replaced by an appropriately imprinted matrix. An example of the use of such matrixes in this way can be seen in Vlatakis, et al., Nature 361: 645-647 (1993). Through the use of isotope-labeling, the “free” concentration of compound which modulates the expression or activity of ICAM, MAPK10, KIAA0861, NUMA1, GALE, DPF3 or LOC145197 can be readily monitored and used in calculations of IC₅₀. Such “imprinted” affinity matrixes can also be designed to include fluorescent groups whose photon-emitting properties measurably change upon local and selective binding of target compound. These changes can be readily assayed in real time using appropriate fiberoptic devices, in turn allowing the dose in a test subject to be quickly optimized based on its individual IC₅₀. A rudimentary example of such a “biosensor” is discussed in Kriz et al., Analytical Chemistry 67: 2142-2144 (1995).

[0236] Provided herein are methods of modulating ICAM, MAPK10, KIAA0861, NUMA1, GALE, DPF3 or LOC145197 expression or activity for therapeutic purposes. Accordingly, in an exemplary embodiment, the modulatory method involves contacting a cell with a ICAM, MAPK10, KIAA0861, NUMA1, GALE, DPF3 or LOC145197 or agent that modulates one or more of the activities of ICAM, MAPK10, KIAA0861, NUMA1, GALE, DPF3 or LOC145197 polypeptide activity associated with the cell. An agent that modulates ICAM, MAPK10, KIAA0861, NUMA1, GALE, DPF3 or LOC145197 polypeptide activity can be an agent as described herein, such as a nucleic acid or a polypeptide, a naturally-occurring target molecule of a ICAM, MAPK10, KIAA0861, NUMA41, GALE, DPF3 or LOC145197 polypeptide (e.g., a ICAM, MAPK10, KIAA0861, NUMA1, GALE, DPF3 or LOC145197 substrate or receptor), a ICAM, MAPK10, KIAA0861, NUMA41, GALE, DPF3 or LOC145197 antibody, a ICAM, MAPK10, KIAA0861, NUMA1, GALE, DPF3 or LOC145197 agonist or antagonist, a peptidomimetic of a ICAM, MAPK10, KIAA0861, NUMA1, GALE, DPF3 or LOC145197 agonist or antagonist, or other small molecule.

[0237] In one embodiment, the agent stimulates one or more ICAM, MAPK10, KIAA0861, NUMA1, GALE, DPF3 or LOC145197 activities. Examples of such stimulatory agents include active ICAM, MAPK10, KIAA0861, NUMA1, GALE, DPF3 or LOC145197 polypeptide and a nucleic acid molecule encoding ICAM, MAPK10, KIAA0861, NUMA1, GALE, DPF3 or LOC145197. In another embodiment, the agent inhibits one or more ICAM, MAPK10, KIAA0861, NUMA1, GALE, DPF3 or LOC145197 activities. Examples of such inhibitory agents include antisense ICAM, MAPK10, KIAA0861, NUMA1, GALE, DPF3 or LOC145197 nucleic acid molecules, anti-ICAM, MAPK10, KIAA0861, NUMA1, GALE, DPF3 or LOC145197 antibodies, and ICAM, MAPK10, KIAA0861, NUMA1, GALE, DPF3 or LOC145197 inhibitors, and competitive inhibitors that target ICAM, MAPK10, KIAA0861, NUMA1, GALE, DPF3 or LOC145197. These modulatory methods can be performed in vitro (e.g., by culturing the cell with the agent) or, alternatively, in vivo (e.g., by administering the agent to a subject). As such, provided are methods of treating an individual afflicted with a disease or disorder characterized by aberrant or unwanted expression or activity of a ICAM, MAPK10, KIAA0861, NUMA1, GALE, DPF3 or LOC145197 polypeptide or nucleic acid molecule. In one embodiment, the method involves administering an agent (e.g., an agent identified by a screening assay described herein), or combination of agents that modulates (e.g., upregulates or downregulates) ICAM, MAPK10, KIAA0861, NUMA1, GALE, DPF3 or LOC145197 expression or activity. In another embodiment, the method involves administering a ICAM, MAPK10, KIAA0861, NUMA1, GALE, DPF3 or LOC145197 polypeptide or nucleic acid molecule as therapy to compensate for reduced, aberrant, or unwanted ICAM, MAPK10, KIAA0861, NUMA1, GALE, DPF3 or LOC145197 expression or activity.

[0238] Stimulation of ICAM, MAPK10, KIAA0861, NUMA1, GALE, DPF3 or LOC145197 activity is desirable in situations in which ICAM, MAPK10, KIAA0861, NUMA1, GALE, DPF3 or LOC145197 is abnormally downregulated and/or in which increased ICAM, MAPK10, KIAA0861, NUMA1, GALE, DPF3 or LOC145197 activity is likely to have a beneficial effect. For example, stimulation of ICAM, MAPK10, KIAA0861, NUMA1, GALE, DPF3 or LOC145197 activity is desirable in situations in which a ICAM, MAPK10, KIAA0861, NUMA1, GALE, DPF3 or LOC145197 is downregulated and/or in which increased ICAM, MAPK10, KIAA0861, NUMA1, GALE, DPF3 or LOC145197 activity is likely to have a beneficial effect. Likewise, inhibition of ICAM, MAPK10, KIAA0861, NUMA1, GALE, DPF3 or LOC145197 activity is desirable in situations in which ICAM, MAPK10, KIAA0861, NUMA1, GALE, DPF3 or LOC145197 is abnormally upregulated and/or in which decreased ICAM, MAPK10, KIAA0861, NUMA1, GALE, DPF3 or LOC145197 activity is likely to have a beneficial effect.

[0239] Methods of Treatment

[0240] In another aspect, provided are methods for identifying a risk of cancer in an individual as described herein and, if a genetic predisposition is identified, treating that individual to delay or reduce or prevent the development of cancer. Such a procedure can be used to treat breast cancer. Optionally, treating an individual for cancer may include inhibiting cellular proliferation, inhibiting metastasis, inhibiting invasion, or preventing tumor formation or growth as defined herein. Suitable treatments to prevent or reduce or delay breast cancer focus on inhibiting additional cellular proliferation, inhibiting metastasis, inhibiting invasion, and preventing further tumor formation or growth. Treatment usually includes surgery followed by radiation therapy. Surgery may be a lumpectomy or a mastectomy (e.g., total, simple or radical). Even if the doctor removes all of the cancer that can be seen at the time of surgery, the patient may be given radiation therapy, chemotherapy, or hormone therapy after surgery to try to kill any cancer cells that may be left. Radiation therapy is the use of x-rays or other types of radiation to kill cancer cells and shrink tumors. Radiation therapy may use external radiation (using a machine outside the body) or internal radiation. Chemotherapy is the use of drugs to kill cancer cells. Chemotherapy may be taken by mouth, or it may be put into the body by inserting a needle into a vein or muscle. Hormone therapy often focuses on estrogen and progesterone, which are hormones that affect the way some cancers grow. If tests show that the cancer cells have estrogen and progesterone receptors (molecules found in some cancer cells to which estrogen and progesterone will attach), hormone therapy is used to block the way these hormones help the cancer grow. Hormone therapy with tamoxifen is often given to patients with early stages of breast cancer and those with metastatic breast cancer. Other types of treatment being tested in clinical trials include sentinel lymph node biopsy followed by surgery and high-dose chemotherapy with bone marrow transplantation and peripheral blood stem cell transplantation. Any preventative/therapeutic treatment known in the art may be prescribed and/or administered, including, for example, surgery, chemotherapy and/or radiation treatment, and any of the treatments may be used in combination with one another to treat or prevent breast cancer (e.g., surgery followed by radiation therapy).

[0241] Also provided are methods of preventing or treating cancer comprising providing an individual in need of such treatment with a ICAM, MAPK10, KIAA0861, NUMA1, GALE, DPF3 or LOC145197 inhibitor that reduces or inhibits the overexpression of mutant ICAM, MAPK10, KIAA0861, NUMA1, GALE, DPF3 or LOC145197 (e.g., a ICAM, MAPK10, KIAA0861, NUMA1, GALE, DPF3 or LOC145197 polynucleotide with an allele that is associated with cancer). Included herein are methods of reducing or blocking the expression of ICAM, MAPK10, KIAA0861, NUMA1, GALE, DPF3 or LOC145197 comprising providing or administering to individuals in need of reducing or blocking the expression of ICAM, MAPK10, KIAA0861, NUMA1, GALE, DPF3 or LOC145197 a pharmaceutical or physiologically acceptable composition comprising a molecule capable of inhibiting expression of ICAM, MAPK10, KIAA0861, NUMA1, GALE, DPF3 or LOC145197, e.g., a siRNA molecule. Also included herein are methods of reducing or blocking the expression of secondary regulatory genes regulated by ICAM, MAPK10, KIAA0861, NUMA1, GALE, DPF3 or LOC145197 that play a role in oncogenesis which comprises introducing competitive inhibitors that target the effect of ICAM, MAPK10, KIAA0861, NUMA1, GALE, DPF3 or LOC145197 on these regulatory genes or that block the binding of positive factors necessary for the expression of these regulatory genes.

[0242] The examples set forth below are intended to illustrate but not limit the invention.

### EXAMPLES

[0243] In the following studies a group of subjects were selected according to specific parameters relating to breast cancer. Nucleic acid samples obtained from individuals in the study group were subjected to genetic analysis, which identified associations between breast cancer and certain polymorphic variants in ICAM region, MAPK10, KIAA0861, NUMA1/FLJ20625/LOC220074 region, and HT014/LOC148902/LYPLA2/GALE region loci (herein referred to as “target genes”, “target nucleotides”, “target polypeptides” or simply “targets”). In addition, methods are described for combining information from multiple SNPs from the target genes found to be independently associated with breast cancer status in a case-control study. The resulting model permits a powerful, more informative quantitation of the combined value of the SNPs for predicting breast cancer susceptibility.

### Example 1

### Samples and Pooling Strategies

Sample Selection

[0244] Blood samples were collected from individuals diagnosed with breast cancer, which were referred to as case samples. Also, blood samples were collected from individuals not diagnosed with breast cancer as gender and age-matched controls. All of the samples were of German/German descent. A database was created that listed all phenotypic trait information gathered from individuals for each case and control sample. Genomic DNA was extracted from each of the blood samples for genetic analyses.

[0245] DNA Extraction from Blood Samples

[0246] Six to ten milliliters of whole blood was transferred to a 50 ml tube containing 27 ml of red cell lysis solution (RCL). The tube was inverted until the contents were mixed. Each tube was incubated for 10 minutes at room temperature and inverted once during the incubation. The tubes were then centrifuged for 20 minutes at 3000×g and the supernatant was carefully poured off. 100-200 μl of residual liquid was left in the tube and was pipetted repeatedly to resuspend the pellet in the residual supernatant. White cell lysis solution (WCL) was added to the tube and pipetted repeatedly until completely mixed. While no incubation was normally required, the solution was incubated at 37° C. or room temperature if cell clumps were visible after mixing until the solution was homogeneous. 2 ml of protein precipitation was added to the cell lysate. The mixtures were vortexed vigorously at high speed for 20 sec to mix the protein precipitation solution uniformly with the cell lysate, and then centrifuged for 10 minutes at 3000×g. The supernatant containing the DNA was then poured into a clean 15 ml tube, which contained 7 ml of 100% isopropanol. The samples were mixed by inverting the tubes gently until white threads of DNA were visible. Samples were centrifuged for 3 minutes at 2000×g and the DNA was visible as a small white pellet. The supernatant was decanted and 5 ml of 70% ethanol was added to each tube. Each tube was inverted several times to wash the DNA pellet, and then centrifuged for 1 minute at 2000×g. The ethanol was decanted and each tube was drained on clean absorbent paper. The DNA was dried in the tube by inversion for 10 minutes, and then 1000 μl of 1×TE was added. The size of each sample was estimated, and less TE buffer was added during the following DNA hydration step if the sample was smaller. The DNA was allowed to rehydrate overnight at room temperature, and DNA samples were stored at 2-8° C.

[0247] DNA was quantified by placing samples on a hematology mixer for at least 1 hour. DNA was serially diluted (typically 1: 80, 1: 160, 1: 320, and 1: 640 dilutions) so that it would be within the measurable range of standards. 125 μl of diluted DNA was transferred to a clear U-bottom microtitre plate, and 125 μl of 1×TE buffer was transferred into each well using a multichannel pipette. The DNA and 1×TE were mixed by repeated pipetting at least 15 times, and then the plates were sealed. 50 μl of diluted DNA was added to wells A5-H12 of a black flat bottom microtitre plate. Standards were inverted six times to mix them, and then 50 μl of 1×TE buffer was pipetted into well A1, 1000 ng/ml of standard was pipetted into well A2, 500 ng/ml of standard was pipetted into well A3, and 250 ng/ml of standard was pipetted into well A4. PicoGreen (Molecular Probes, Eugene, Oreg.) was thawed and freshly diluted 1: 200 according to the number of plates that were being measured. PicoGreen was vortexed and then 50 μl was pipetted into all wells of the black plate with the diluted DNA. DNA and PicoGreen were mixed by pipetting repeatedly at least 10 times with the multichannel pipette. The plate was placed into a Fluoroskan Ascent Machine (microplate fluorometer produced by Labsystems) and the samples were allowed to incubate for 3 minutes before the machine was run using filter pairs485 nm excitation and 538 nm emission wavelengths. Samples having measured DNA concentrations of greater than 450 ng/μl were re-measured for conformation. Samples having measured DNA concentrations of 20 ng/μl or less were re-measured for confirmation.

[0248] Pooling Strategies

[0249] Samples were placed into one of two groups based on disease status. The two groups were female case groups and female control groups. A select set of samples from each group were utilized to generate pools, and one pool was created for each group. Each individual sample in a pool was represented by an equal amount of genomic DNA. For example, where 25 ng of genomic DNA was utilized in each PCR reaction and there were 200 individuals in each pool, each individual would provide 125 pg of genomic DNA. Inclusion or exclusion of samples for a pool was based upon the following criteria: the sample was derived from an individual characterized as Caucasian; the sample was derived from an individual of German paternal and maternal descent; the database included relevant phenotype information for the individual; case samples were derived from individuals diagnosed with breast cancer; control samples were derived from individuals free of cancer and no family history of breast cancer; and sufficient genomic DNA was extracted from each blood sample for all allelotyping and genotyping reactions performed during the study. Phenotype information included pre- or post-menopausal, familial predisposition, country or origin of mother and father, diagnosis with breast cancer (date of primary diagnosis, age of individual as of primary diagnosis, grade or stage of development, occurrence of metastases, e.g., lymph node metastases, organ metastases), condition of body tissue (skin tissue, breast tissue, ovary tissue, peritoneum tissue and myometrium), method of treatment (surgery, chemotherapy, hormone therapy, radiation therapy). Samples that met these criteria were added to appropriate pools based on gender and disease status.

[0250] The selection process yielded the pools set forth in Table 1, which were used in the studies that follow:

TABLE 1

| | Female CASE | Female CONTROL |
|---|---|---|
| Pool size | 272 | 276 |
| (Number) | | |
| Pool Criteria | case | control |
| (ex: case/control) | | |
| Mean Age | 59.6 | 55.4 |
| (ex: years) | | |

### Example 2

### Association of Polymorphic Variants with Breast cancer

[0251] A whole-genome screen was performed to identify particular SNPs associated with occurrence of breast cancer. As described in Example 1, two sets of samples were utilized, which included samples from female individuals having breast cancer (breast cancer cases) and samples from female individuals not having cancer (female controls). The initial screen of each pool was performed in an allelotyping study, in which certain samples in each group were pooled. By pooling DNA from each group, an allele frequency for each SNP in each group was calculated. These allele frequencies were then compared to one another. Particular SNPs were considered as being associated with breast cancer when allele frequency differences calculated between case and control pools were statistically significant. SNP disease association results obtained from the allelotyping study were then validated by genotyping each associated SNP across all samples from each pool. The results of the genotyping were then analyzed, allele frequencies for each group were calculated from the individual genotyping results, and a p-value was calculated to determine whether the case and control groups had statistically significantly differences in allele frequencies for a particular SNP. When the genotyping results agreed with the original allelotyping results, the SNP disease association was considered validated at the genetic level.

[0252] SNP Panel Used for Genetic Analyses

[0253] A whole-genome SNP screen began with an initial screen of approximately 25,000 SNPs over each set of disease and control samples using a pooling approach. The pools studied in the screen are described in Example 1. The SNPs analyzed in this study were part of a set of 25,488 SNPs confirmed as being statistically polymorphic as each is characterized as having a minor allele frequency of greater than 10%. The SNPs in the set reside in genes or in close proximity to genes, and many reside in gene exons. Specifically, SNPs in the set are located in exons, introns, and within 5,000 base-pairs upstream of a transcription start site of a gene. In addition, SNPs were selected according to the following criteria: they are located in ESTs; they are located in Locuslink or Ensemble genes; and they are located in Genomatix promoter predictions. SNPs in the set also were selected on the basis of even spacing across the genome, as depicted in Table 2.

[0254] A case-control study design using a whole genome association strategy involving approximately 28,000 single nucleotide polymorphisms (SNPs) was employed. Approximately 25,000 SNPs were evenly spaced in gene-based regions of the human genome with a median inter-marker distance of about 40,000 base pairs. Additionally, approximately 3,000 SNPs causing amino acid substitutions in genes described in the literature as candidates for various diseases were used. The case-control study samples were of female German origin (German paternal and maternal descent) 548 individuals were equally distributed in two groups (female controls and female cases). The whole genome association approach was first conducted on 2 DNA pools representing the 2 groups. Significant markers were confirmed by individual genotyping.

TABLE 2

| General Statistics | | | Spacing Statistics | | |
|---|---|---|---|---|---|
| Total # of SNPs | 28,532 | | Median | 34,424 | bp |
| # of Exonic SNPs | 8,497 | (30%) | Minimum* | 1,000 | bp |
| # SNPs with | 26,625 | (93%) | Maximum* | 3,000,000 | bp |
| refSNP ID | | | | | |
| Gene Coverage | 23,874 | | Mean | 122,412 | bp |
| Chromosome | All | | Std Deviation | 354, | bp |
| Coverage | | | | | |

*Excludes outliers

Allelotyping and Genotyping Results

[0255] The genetic studies summarized above and described in more detail below identified allelic variants associated with breast cancer. The allelic variants identified from the SNP panel described in Table 2 are summarized below in Table 3.

TABLE 3

| | | Chromo- | Position | | | | | | |
|---|---|---|---|---|---|---|---|---|---|
| SNP | Chromo- | some | in SEQ ID | Contig | Contig | Sequence | | Sequence | Allelic |
| Reference | some | Position | NO: 1-7 | Identification | Position | Identification | Locus | Position | Variability |
| 11549918 | 19 | 10263938 | 44247 | NT_011295 | 1665740 | NM_003259 | ICAM region | Exon | C/T |
| | | | | | | | | (I301V) | |
| 1541998 | 4 | 87408539 | 36424 | NT_016354 | 11444849 | NM_002753 | MAPK10 | intron | C/T |
| 2001449 | 3 | 184049849 | 48563 | NT_005612 | 89424094 | NM_015078 | KIAA0861 | intron | G/C |
| | | | | | | NM_006185 | NUMA1 | upstream | T/C |
| 673478 | 11 | 71525412 | 49002 | NT_033927 | 1998133 | NM_017907 | FLJ20625 | downstream | |
| | | | | | | NM_145309 | LOC220074 | intron | |
| | | | | | | NM_000403 | GALE | downstream | A/G |
| 4237 | 1 | 23583604 | 87877 | NT_004610 | 4917379 | NM_020362 | HT014 | 3′utr | |
| | | | | | | NM_007260 | LYPLA2 | upstream | |
| 1990440 | 14 | 71267195 | 40095 | NT_026437 | 53197195 | NM_012074 | DPF3 | intron | G/C |
| 1054745 | 14 | 99900494 | | NT_026437 | 81830494 | XM_096734 | LOC145197 | upstream | G/A |

[0256] Table 3 includes information pertaining to the incident polymorphic variant associated with breast cancer identified herein. Public information pertaining to the polymorphism and the genomic sequence that includes the polymorphism are indicated. The genomic sequences identified in Table 3 may be accessed at the http address www.ncbi.nih.gov/entrez/query.fcgi, for example, by using the publicly available SNP reference number (e.g., rs1541998). The chromosome position refers to the position of the SNP within NCBI's Genome Build 34, which may be accessed at the following http address: www.ncbi.nlm.nih.gov/mapview/map_search.cgi?chr=hum_chr.inf&query=. The “Contig Position” provided in Table 3 corresponds to a nucleotide position set forth in the contig sequence, and designates the polymorphic site corresponding to the SNP reference number. The sequence containing the polymorphisms also may be referenced by the “Sequence Identification” set forth in Table 3. The “Sequence Identification” corresponds to cDNA sequence that encodes associated target polypeptides (e.g., NUMA1) of the invention. The position of the SNP within the cDNA sequence is provided in the “Sequence Position” column of Table 3. Also, the allelic variation at the polymorphic site and the allelic variant identified as associated with breast cancer is specified in Table 3. All nucleotide sequences referenced and accessed by the parameters set forth in Table 3 are incorporated herein by reference. The positions for these SNPs are indicated in the tables below and in SEQ ID NO: 1-7.

[0257] Assay for Verifying, Allelotyping, and Genotyping SNPs

[0258] A MassARRAY™ system (Sequenom, Inc.) was utilized to perform SNP genotyping in a high-throughput fashion. This genotyping platform was complemented by a homogeneous, single-tube assay method (hME™ or homogeneous MassEXTEND™ (Sequenom, Inc.)) in which two genotyping primers anneal to and amplify a genomic target surrounding a polymorphic site of interest. A third primer (the MassEXTEND™ primer), which is complementary to the amplified target up to but not including the polymorphism, was then enzymatically extended one or a few bases through the polymorphic site and then terminated.

[0259] For each polymorphism, SpectroDESIGNER™ software (Sequenom, Inc.) was used to generate a set of PCR primers and a MassEXTEND™ primer was used to genotype the polymorphism. Table 4 shows PCR primers and Table 5 shows extension primers used for analyzing polymorphisms. The initial PCR amplification reaction was performed in a 5 μl total volume containing 1×PCR buffer with 1.5 mM MgCl₂ (Qiagen), 200 μM each of dATP, dGTP, dCTP, dTTP (Gibco-BRL), 2.5 ng of genomic DNA, 0.1 units of HotStar DNA polymerase (Qiagen), and 200 nM each of forward and reverse PCR primers specific for the polymorphic region of interest.

TABLE 4
PCR Primers

| | | |
|---|---|---|
| Refer- | | |
| ence | Forward | Reverse |
| SNP ID | PCR primer | PCR primer |

| | | |
|---|---|---|
| 11549918 | GACAGCCACAGCTAGCGCAGA | TGTTTTCGCCCCCCAGG |
| | | GTGAC |
| 1541998 | CTGATTATTCTGATGGTAATG | GCCCATGTTAACATTTTCTTC |
| 2001449 | ATGTCAAGTGCACCCACATG | AGGAAGAAACTGACGGAAGG |
| 673478 | TAATACAAAGGTGGCAGCAG | TTGACAAGGATAAGGACAAG |
| 4237 | GCACATGGCCACATTAACTGG | TGGCTGTGGAAATTGGG |
| | | TCTTG |
| 1990440 | CCAGGGTGTGTTCTAATACG | AAGTCACTAACCCCACACAC |
| 1054745 | GACTTTTAGGTCTGAGTTGG | CTTCCTCTAGCAGTGTATTTC |

[0260] Samples were incubated at 95° C. for 15 minutes, followed by 45 cycles of 95° C. for 20 seconds, 56° C. for 30 seconds, and 72° C. for 1 minute, finishing with a 3 minute final extension at 72° C. Following amplification, shrimp alkaline phosphatase (SAP) (0.3 units in a 2 μl volume) (Amersham Pharmacia) was added to each reaction (total reaction volume was 7 μl) to remove any residual dNTPs that were not consumed in the PCR step. Samples were incubated for 20 minutes at 37° C., followed by 5 minutes at 85° C. to denature SAP.

[0261] Once the SAP reaction was complete, a primer extension reaction was initiated by adding a polymorphism-specific MassEXTEND™ primer cocktail to each sample. Each MassEXTEND™ cocktail included a specific combination of dideoxynucleotides (ddNTPs) and deoxynucleotides (dNTPs) used to distinguish polymorphic alleles from one another. In Table 5, ddNTPs are shown and the fourth nucleotide not shown is the dNTP.

TABLE 5
Extend Primers

| | | |
|---|---|---|
| Reference | Extend | Term |
| SNP ID | Probe | Mix |

| | | |
|---|---|---|
| 11549918 | CCCAGGGTGACGTTGCAGA | ACG |
| 1541998 | ATTATTCTGATGGTAATGATCCAG | ACG |
| 2001449 | CACATGCCTGCTCGCCCCC | ACT |
| 673478 | AAGGGGAGGTCGACTGGG | ACT |
| 4237 | GGCATCTGGCAGTCATGG | ACT |
| 1990440 | CGTCAGCAAATGTGTACCGA | ACT |
| 10547457 | TTGGTCCATTAGGGAATTAGA | ACG |

[0262] The Mass EXTEND™ reaction was performed in a total volume of 9 μl, with the addition of 1× ThermoSequenase buffer, 0.576 units of ThermoSequenase (Arnersham Pharmacia), 600 nM MassEXTEND™ primer, 2 mM of ddATP and/or ddCTP and/or ddGTP and/or ddTTP, and 2 mM of dATP or dCTP or dGTP or dTTP. The deoxy nucleotide (dNTP) used in the assay normally was complementary to the nucleotide at the polymorphic site in the amplicon. Samples were incubated at 94° C. for 2 minutes, followed by 55 cycles of 5 seconds at 94° C., 5 seconds at 52° C., and 5 seconds at 72° C.

[0263] Following incubation, samples were desalted by adding 16 μl of water (total reaction volume was 25 μl), 3 mg of SpectroCLEAN™ sample cleaning beads (Sequenom, Inc.) and allowed to incubate for 3 minutes with rotation. Samples were then robotically dispensed using a piezoelectric dispensing device (SpectroJET™ (Sequenom, Inc.)) onto either 96-spot or 384-spot silicon chips containing a matrix that crystallized each sample (SpectroCHIP® (Sequenom, Inc.)). Subsequently, MALDI-TOF mass spectrometry (Biflex and Autoflex MALDI-TOF mass spectrometers (Bruker Daltonics) can be used) and SpectroTYPER RT™ software (Sequenom, Inc.) were used to analyze and interpret the SNP genotype for each sample.

[0264] Genetic Analysis

[0265] Variations identified in the target genes are provided in their respective genomic sequences (see FIGS. 1-7) Minor allelic frequencies for these polymorphisms was verified as being 10% or greater by determining the allelic frequencies using the extension assay described above in a group of samples isolated from 92 individuals originating from the state of Utah in the United States, Venezuela and France (Coriell cell repositories).

[0266] Genotyping results are shown for female pools in Table 6A and 6B. Table 6A shows the orginal genotyping results and Table 6B shows the genotyped results re-analyzed to remove duplicate individuals from the cases and controls (i.e., individuals who were erroneously included more than once as either cases or controls). Therefore, Table 6B represents a more accurate measure of the allele frequencies for this particular SNP. In the subsequent tables, “AF” refers to allelic frequency; and “F case” and “F control” refer to female case and female control groups, respectively.

TABLE 6A

| | | | | | Breast |
|---|---|---|---|---|---|
| | | | | | Cancer |
| Reference | AF F | AF F | | | Assoc. |
| SNP ID | case | control | p-value | Odds Ratio | Allele |
| 11549918 | C = 0.651 | C = 0.564 | 0.0038 | 0.69 | C |
| | T = 0.349 | T = 0.436 | | | |
| 1541998 | T = 0.780 | T = 0.839 | 0.0153 | 0.69 | C |
| | C = 0.220 | C = 0.161 | | | |
| 2001449 | G = 0.703 | G = 0.780 | 0.0040 | 1.49 | C |
| | C = 0.297 | C = 0.220 | | | |
| 673478 | T = 0.919 | T = 0.953 | 0.0238 | 1.74 | C |
| | C = 0.081 | C = 0.047 | | | |
| 4237 | A = 0.590 | A = 0.530 | 0.0431 | 0.78 | A |
| | G = 0.410 | G = 0.470 | | | |
| 1990440 | C = 0.876 | C = 0.926 | 0.0027 | 0.65 | G |
| | G = 0.124 | G = 0.074 | | | |
| 1054745 | A = 0.871 | A = 0.805 | 0.0039 | | A |
| | G = 0.129 | G = 0.195 | | | |

[0267] TABLE 6B

| | | | | | Breast |
|---|---|---|---|---|---|
| | | | | | Cancer |
| Reference | AF F | AF F | | | Assoc. |
| SNP ID | case | control | p-value | Odds Ratio | Allele |
| 11549918 | C = 0.658 | C = 0.556 | 0.0012 | 0.65 | C |
| | T = 0.342 | T = 0.444 | | | |
| 1541998 | T = 0.771 | T = 0.839 | 0.0070 | 0.65 | C |
| | C = 0.229 | C = 0.161 | | | |
| 2001449 | G = 0.693 | G = 0.782 | 0.0012 | 1.59 | C |
| | C = 0.307 | C = 0.218 | | | |
| 673478 | T = 0.916 | T = 0.953 | 0.0171 | 1.85 | C |
| | C = 0.084 | C = 0.047 | | | |
| 4237 | A = 0.584 | A = 0.527 | 0.0704 | 0.79 | A |
| | G = 0.416 | G = 0.473 | | | |
| 1990440 | C = 0.879 | C = 0.915 | 0.0692 | 0.67 | G |
| | G = 0.121 | G = 0.085 | | | |
| 1054745 | A = 0.866 | A = 0.801 | 0.0061 | 1.60 | A |
| | G = 0.134 | G = 0.199 | | | |

[0268] The single marker alleles set forth in Table 3 were considered validated, since the genotyping data for the females, males or both pools were significantly associated with breast cancer, and because the genotyping results agreed with the original allelotyping results. Particularly significant associations with breast cancer are indicated by a calculated p-value of less than 0.05 for genotype results, which are set forth in bold text.

[0269] Odds ratio results are shown in Tables 6A and 6B. An odds ratio is an unbiased estimate of relative risk which can be obtained from most case-control studies. Relative risk (RR) is an estimate of the likelihood of disease in the exposed group (susceptibility allele or genotype carriers) compared to the unexposed group (not carriers). It can be calculated by the following equation:
RR=IA/Ia
[0270] IA is the incidence of disease in the A carriers and Ia is the incidence of disease in the non-carriers.
[0271] RR>1 indicates the A allele increases disease susceptibility.
[0272] RR≦1 indicates the a allele increases disease susceptibility.

[0273] For example, RR=1.5 indicates that carriers of the A allele have 1.5 times the risk of disease than 50% more likely to get the disease.

[0274] Case-control studies do not allow the direct estimation of IA and Ia, therefore relative risk cannot be directly estimated. However, the odds ratio (OR) can be calculated using the following equation:
OR=(nDAnda)/(ndAnDa)=pDA(1−pdA)/pdA(131 pDA), or
[0275] OR=((case f)/(1−case f))/((control f)/(1−control f)), where f=susceptibility allele frequency.

[0276] An odds ratio can be interpreted in the same way a relative risk is interpreted and can be directly estimated using the data from case-control studies, i.e., case and control allele frequencies. The higher the odds ratio value, the larger the effect that particular allele has on the development of breast cancer. Possessing an allele associated with a relatively high odds ratio translates to having a higher risk of developing or having breast cancer.

### Example 3

### Samples and Pooling Strategies for the Replication Samples

[0277] The SNPs of Table 3 were genotyped again in a collection of replication samples to further validate its association with breast cancer. Like the original study population described in Examples 1 and 2, the replication samples consisted of females diagnosed with breast cancer (cases) and females without cancer (controls). The case and control samples were selected and genotyped as described below.

Pooling Strategies

[0278] Samples were placed into one of two groups based on disease status. The two groups were female case groups and female control groups. A select set of samples from each group were utilized to generate pools, and one pool was created for each group. Each individual sample in a pool was represented by an equal amount of genomic DNA. For example, where 25 ng of genomic DNA was utilized in each PCR reaction and there were 190 individuals in each pool (i.e., 190 cases and 190 controls), each individual would provide 125 pg of genomic DNA. Inclusion or exclusion of samples for a pool was based upon the following criteria: the sample was derived from a female individual characterized as Caucasian from Australia; case samples were derived from individuals diagnosed with breast cancer; control samples were derived from individuals free of cancer and no family history of breast cancer; and sufficient genomic DNA was extracted from each blood sample for all allelotyping and genotyping reactions performed during the study. Samples in the pools also were age-matched. Samples that met these criteria were added to appropriate pools based on gender and disease status.

[0279] The selection process yielded the “Griffith” samples set forth in Table 7A and the “Kiechle” samples set forth in Table 7B, which were used in the studies that follow:

TABLE 7A

| | Female CASE | Female CONTROL |
|---|---|---|
| Pool size | 190 | 190 |
| (Number) | | |
| Pool Criteria | case | control |
| (ex: case/control) | | |
| Mean Age | 64.5 | ** |
| (ex: years) | | |

** Each case was matched by a control within 5 years of age of the case.

[0280] TABLE 7B

| | Female CASE | Female CONTROL |
|---|---|---|
| Pool size | 195 | 153 |
| (Number) | | |
| Pool Criteria | case | control |
| (ex: case/control) | | |

[0281] The replication genotyping results are shown in Table 8A for the Griffith samples and in Table 8B for the Kiechle samples. The odds ratio was calculated as described in Example 2.

TABLE 8A

| Reference | AF | AF | | |
|---|---|---|---|---|
| SNP ID | F case | F control | p-value | Odds Ratio |
| 11549918 | C = 0.650 | C = 0.584 | 0.0624 | 0.75 |
| | T = 0.350 | T = 0.416 | | |
| 1541998 | T = 0.820 | T = 0.864 | 0.1010 | 0.72 |
| | C = 0.180 | C = 0.136 | | |
| 2001449 | G = 0.685 | G = 0.777 | 0.005 | 1.59 |
| | C = 0.315 | C = 0.223 | | |
| 673478 | T = 0.927 | T = 0.957 | 0.077 | 1.76 |
| | C = 0.073 | C = 0.043 | | |
| 4237 | A = 0.632 | A = 0.577 | 0.1260 | 1.26 |
| | G = 0.368 | G = 0.423 | | |
| 1990440 | C = 0.822 | C = 0.860 | 0.172 | 0.756 |
| | G = 0.178 | G = 0.140 | | |
| 1054745 | A = 0.894 | A = 0.921 | 0.224 | 0.726 |
| | G = 0.106 | G = 0.079 | | |

[0282] TABLE 8B

| Reference | AF | AF | | |
|---|---|---|---|---|
| SNP ID | F case | F control | p-value | Odds Ratio |
| 11549918 | C = 0.641 | C = 0.570 | 0.066 | 0.74 |
| | T = 0.359 | T = 0.430 | | |
| 1541998 | T = 0.811 | T = 0.791 | 0.521 | 1.14 |
| | C = 0.189 | C = 0.209 | | |
| 2001449 | G = 0.754 | G = 0.716 | 0.267 | 0.82 |
| | C = 0.246 | C = 0.284 | | |
| 673478 | T = 0.942 | T = 0.955 | 0.474 | 1.30 |
| | C = 0.058 | C = 0.045 | | |
| 4237 | A = 0.618 | A = 0.587 | 0.429 | 0.88 |
| | G = 0.382 | G = 0.413 | | |
| 1990440 | C = 0.889 | C = 0.924 | 0.124 | 0.66 |
| | G = 0.111 | G = 0.076 | | |
| 1054745 | A = 0.877 | A = 0.819 | 0.0396 | 1.57 |
| | G = 0.123 | G = 0.181 | | |

[0283] The absence of a statistically significant association in the replication cohort should not be interpreted as minimizing the value of the original finding. There are many reasons why a biologically derived association identified in a sample from one population would not replicate in a sample from another population. The most important reason is differences in population history. Due to bottlenecks and founder effects, there may be common disease predisposing alleles present in one population that are relatively rare in another, leading to a lack of association in the candidate region. Also, because common diseases such as breast cancer are the result of susceptibilities in many genes and many environmental risk factors, differences in population-specific genetic and environmental backgrounds could mask the effects of a biologically relevant allele. For these and other reasons, statistically strong results in the original, discovery sample that did not replicate in the replication sample may be further evaluated in additional replication cohorts and experimental systems.

### Example 4

### ICAM Region Proximal SNPs

[0284] It has been discovered that a polymorphic variation (rs11549918) in a region that encodes ICAM1, ICAM2 and ICAM5 is associated with the occurrence of breast cancer (see Examples 1 and 2). Subsequently, SNPs proximal to the incident SNP (rs1549918) were identified and allelotyped in breast cancer sample sets and control sample sets as described in Examples 1 and 2. Approximately 195 allelic variants located within the ICAM region were identified and allelotyped. The polymorphic variants are set forth in Table 9. The chromosome position provided in column four of Table 9 is based on Genome “Build 34” of NCBI's GenBank.

TABLE 9

| | Position in | | Chromosome | Allele | Genome | Deduced |
|---|---|---|---|---|---|---|
| dbSNP rs# | SEQ ID NO: 1 | Chromosome | Position | Variants | Letter | Iupac |
| 2884487 | 230 | 19 | 10219830 | t/c | c | Y |
| 2358580 | 4282 | 19 | 10223882 | a/g | g | R |
| 2304236 | 11844 | 19 | 10231444 | a/c | a | M |
| 1059840 | 11890 | 19 | 10231490 | a/t | t | W |
| 1059843 | 11905 | 19 | 10231505 | c/t | c | Y |
| 11115 | 11942 | 19 | 10231542 | t/c | c | Y |
| 1059849 | 12054 | 19 | 10231654 | g/a | a | R |
| 1059855 | 12070 | 19 | 10231670 | t/c | c | Y |
| 5030386 | 21497 | 19 | 10241097 | c/g | c | S |
| 5030339 | 21537 | 19 | 10241137 | a/g | g | R |
| 5030387 | 21682 | 19 | 10241282 | t/g | t | K |
| 5030388 | 22073 | 19 | 10241673 | a/g | g | R |
| 1799766 | 22393 | 19 | 10241993 | c/— | c | N |
| 5030389 | 22394 | 19 | 10241994 | a/— | a | N |
| 5490 | 23227 | 19 | 10242827 | c/a | a | M |
| 11575070 | 23614 | 19 | 10243214 | c/g | g | S |
| 5030340 | 23681 | 19 | 10243281 | c/t | c | Y |
| 5030390 | 23937 | 19 | 10243537 | a/g | g | R |
| 5030391 | 24037 | 19 | 10243637 | a/g | g | R |
| 3093035 | 24373 | 19 | 10243973 | a/g | g | R |
| 11667983 | 24589 | 19 | 10244189 | c/t | c | Y |
| 5030341 | 24675-24676 | 19 | 10244275\hat{ } | ct/— | ct | NN |
| | | | 10244276 | | | |
| 5030342 | 24680 | 19 | 10244280 | t/g | g | K |
| 5030343 | 24754 | 19 | 10244354 | t/c | c | Y |
| 5030344 | 25053 | 19 | 10244653 | g/a | g | R |
| 5030347 | 26004 | 19 | 10245604 | a/c | c | M |
| 5030348 | 26023 | 19 | 10245623 | a/g | a | R |
| 5030349 | 26046 | 19 | 10245646 | t/c | c | Y |
| 5030350 | 26100 | 19 | 10245700 | a/t | a | W |
| 5030351 | 26817 | 19 | 10246417 | t/c | c | Y |
| 5491 | 26940 | 19 | 10246540 | t/a | a | W |
| 5030352 | 27143 | 19 | 10246743 | g/c | c | S |
| 5030353 | 27162 | 19 | 10246762 | a/g | g | R |
| 10420063 | 28328 | 19 | 10247928 | g/a | a | R |
| 11879117 | 28799 | 19 | 10248399 | g/c | g | S |
| 5030354 | 29166 | 19 | 10248766 | a/c | a | M |
| 5030355 | 29331 | 19 | 10248931 | a/c | a | M |
| 281428 | 29724 | 19 | 10249324 | c/t | c | Y |
| 5030358 | 29773 | 19 | 10249373 | g/a | a | R |
| 5030359 | 29862 | 19 | 10249462 | a/g | g | R |
| 5030392 | 29877 | 19 | 10249477 | t/c | c | Y |
| 5030393 | 30194 | 19 | 10249794 | t/g | g | K |
| 5030360 | 30258 | 19 | 10249858 | t/g | g | K |
| 5030394 | 30549 | 19 | 10250149 | a/g | g | R |
| 281429 | 30648 | 19 | 10250248 | t/c | c | Y |
| 5030361 | 30909 | 19 | 10250509 | t/c | c | Y |
| 5030362 | 30962 | 19 | 10250562 | a/c | c | M |
| 281430 | 31337 | 19 | 10250937 | g/a | a | R |
| 281431 | 31345 | 19 | 10250945 | t/c | t | Y |
| 5030395 | 31534 | 19 | 10251134 | c/t | c | Y |
| 5827095 | 31942 | 19 | 10251542 | a/— | a | N |
| 281432 | 32058 | 19 | 10251658 | g/c | c | S |
| 5030364 | 32109 | 19 | 10251709 | a/t | t | W |
| 5030365 | 32401 | 19 | 10252001 | a/g | a | R |
| 5030368 | 32845 | 19 | 10252445 | g/a | a | R |
| 5030369 | 32864 | 19 | 10252464 | t/c | c | Y |
| 3073809 | 32965-32966 | 19 | 10252565\hat{ } | tt/— | tt | NN |
| | | | 10252566 | | | |
| 2358581 | 33011 | 19 | 10252611 | g/t | t | K |
| 7258215 | 33170 | 19 | 10252770 | c/t | t | Y |
| 5030371 | 33516 | 19 | 10253116 | a/g | g | R |
| 5030372 | 33608 | 19 | 10253208 | t/c | t | Y |
| 281433 | 33623 | 19 | 10253223 | a/c | a | M |
| 5030374 | 33672 | 19 | 10253272 | c/a | a | M |
| 5030375 | 33724 | 19 | 10253324 | a/— | a | N |
| 5030397 | 33787 | 19 | 10253387 | t/g | g | K |
| 281434 | 34020 | 19 | 10253620 | g/a | a | R |
| 12462944 | 34038 | 19 | 10253638 | c/g | g | S |
| 5030398 | 34190 | 19 | 10253790 | c/g | c | S |
| 5030378 | 34706 | 19 | 10254306 | c/g | c | S |
| 12459133 | 34778 | 19 | 10254378 | t/g | g | K |
| 5030399 | 35553 | 19 | 10255153 | a/g | g | R |
| 5492 | 35690 | 19 | 10255290 | g/c | g | S |
| 1800019 | 36173 | 19 | 10255773 | a/c | c | M |
| 1799969 | 36192 | 19 | 10255792 | g/a | g | R |
| 5493 | 36194 | 19 | 10255794 | t/g | g | K |
| 5030381 | 36308 | 19 | 10255908 | c/t | c | Y |
| 5494 | 36317 | 19 | 10255917 | c/t | c | Y |
| 3093033 | 36431 | 19 | 10256031 | g/a | g | R |
| 5495 | 36496 | 19 | 10256096 | g/a | g | R |
| 1801714 | 36608 | 19 | 10256208 | c/t | c | Y |
| 2071441 | 36708 | 19 | 10256308 | c/t | c | Y |
| 5496 | 36847 | 19 | 10256447 | a/g | g | R |
| 5497 | 36868 | 19 | 10256468 | a/g | g | R |
| 5030382 | 37083 | 19 | 10256683 | g/a | a | R |
| 5030400 | 37196 | 19 | 10256796 | c/t | c | Y |
| 2071440 | 37373 | 19 | 10256973 | g/a | g | R |
| 5499 | 37465 | 19 | 10257065 | c/t | c | Y |
| 3093032 | 37736 | 19 | 10257336 | t/c | c | Y |
| 1057981 | 37959 | 19 | 10257559 | g/a | a | R |
| 5500 | 38031 | 19 | 10257631 | a/g | a | R |
| 5501 | 38091 | 19 | 10257691 | t/c | t | Y |
| 5030383 | 38243 | 19 | 10257843 | t/c | c | Y |
| 281436 | 38531 | 19 | 10258131 | a/g | g | R |
| 923366 | 38623 | 19 | 10258223 | t/c | c | Y |
| 281437 | 38638 | 19 | 10258238 | c/t | c | Y |
| 3093030 | 38803 | 19 | 10258403 | t/c | c | Y |
| 5030384 | 39489 | 19 | 10259089 | a/g | g | R |
| 5030385 | 40008 | 19 | 10259608 | g/c | c | S |
| 3810159 | 40711 | 19 | 10260311 | t/c | g | R |
| 281438 | 40775 | 19 | 10260375 | t/g | t | K |
| 3093029 | 40951 | 19 | 10260551 | c/g | c | S |
| 2735442 | 41218 | 19 | 10260818 | g/c | g | S |
| 2569693 | 41304 | 19 | 10260904 | c/t | c | Y |
| 281439 | 41510 | 19 | 10261110 | g/c | g | S |
| 281440 | 41704 | 19 | 10261304 | g/a | g | R |
| 2569694 | 42020 | 19 | 10261620 | c/t | c | Y |
| 11575073 | 42210 | 19 | 10261810 | c/t | c | Y |
| 2569695 | 42302 | 19 | 10261902 | c/g | c | S |
| 2075741 | 42498 | 19 | 10262098 | g/c | g | S |
| 11575074 | 42520 | 19 | 10262120 | a/g | g | R |
| 2569696 | 42607 | 19 | 10262207 | a/g | g | R |
| 2735439 | 42674 | 19 | 10262274 | t/g | t | K |
| 2569697 | 42929 | 19 | 10262529 | g/c | g | S |
| 2075742 | 43007 | 19 | 10262607 | g/c | g | S |
| 2569698 | 43040 | 19 | 10262640 | c/g | c | S |
| 11669397 | 43246 | 19 | 10262846 | c/t | c | Y |
| 901886 | 43531 | 19 | 10263131 | t/c | t | Y |
| 885742 | 44023 | 19 | 10263623 | g/a | a | R |
| 2569699 | 44024 | 19 | 10263624 | t/g | t | K |
| 11549918 | 44338 | 19 | 10263938 | c/t | g | R |
| 2569700 | 44499 | 19 | 10264099 | t/g | g | K |
| 2228615 | 44768 | 19 | 10264368 | a/g | g | R |
| ICAM-AA | 45003 | 19 | 10264603 | c/t | c | Y |
| 2569701 | 45341 | 19 | 10264941 | g/a | g | R |
| 2569702 | 45347 | 19 | 10264947 | t/c | t | Y |
| 2735440 | 45577 | 19 | 10265177 | g/a | a | R |
| 2569703 | 45627 | 19 | 10265227 | c/g | c | S |
| 10418913 | 45794 | 19 | 10265394 | a/g | g | R |
| 1056536 | 46244 | 19 | 10265844 | c/t | g | R |
| 2569704 | 46469 | 19 | 10266069 | t/c | c | Y |
| 11673661 | 46999 | 19 | 10266599 | g/c | g | S |
| 10402760 | 47265 | 19 | 10266865 | t/c | c | Y |
| 0 | 47504 | 19 | 10267104 | a/g | g | R |
| 2569706 | 47547 | 19 | 10267147 | g/a | g | R |
| 2569707 | 47637 | 19 | 10267237 | c/g | g | S |
| 2436545 | 47691 | 19 | 10267291 | c/a | a | M |
| 2436546 | 47692 | 19 | 10267292 | a/c | a | M |
| 2916060 | 47788 | 19 | 10267388 | a/c | t | K |
| 2916059 | 47796 | 19 | 10267396 | t/c | a | R |
| 2916058 | 47800 | 19 | 10267400 | t/a | a | W |
| 2569708 | 47812 | 19 | 10267412 | a/g | g | R |
| 735747 | 47969 | 19 | 10267569 | t/c | t | Y |
| 885743 | 48035 | 19 | 10267635 | a/t | t | W |
| 710845 | 48569 | 19 | 10268169 | c/g | g | S |
| 2569709 | 48823 | 19 | 10268423 | c/g | c | S |
| 2569710 | 48838 | 19 | 10268438 | a/g | a | R |
| 2569711 | 48894 | 19 | 10268494 | c/g | c | S |
| 2569712 | 48934 | 19 | 10268534 | a/t | a | W |
| 12610026 | 49249 | 19 | 10268849 | a/g | g | R |
| 4804129 | 49509 | 19 | 10269109 | c/a | a | M |
| 12150978 | 49718 | 19 | 10269318 | a/g | a | R |
| 439843 | 49963 | 19 | 10269563 | c/a | c | M |
| 892188 | 51193 | 19 | 10270793 | t/c | c | Y |
| 2291473 | 57181 | 19 | 10276781 | t/c | t | Y |
| 281416 | 60184 | 19 | 10279784 | a/g | a | R |
| 281417 | 60530 | 19 | 10280130 | t/c | c | Y |
| 882589 | 61354 | 19 | 10280954 | t/c | g | R |
| 1048941 | 62616 | 19 | 10282216 | t/g | c | M |
| 281418 | 62785 | 19 | 10282385 | g/c | g | S |
| 430092 | 66351 | 19 | 10285951 | c/t | t | Y |
| 368835 | 67386 | 19 | 10286986 | a/g | a | R |
| 2358583 | 67395 | 19 | 10286995 | t/g | g | K |
| 378395 | 67822 | 19 | 10287422 | c/a | a | M |
| 395782 | 68028 | 19 | 10287628 | t/c | t | Y |
| 1045384 | 68646 | 19 | 10288246 | t/g | g | K |
| 281427 | 70520 | 19 | 10290120 | c/t | t | Y |
| 3745264 | 70966 | 19 | 10290566 | t/g | c | M |
| 281426 | 72451 | 19 | 10292051 | g/a | g | R |
| 281425 | 73199 | 19 | 10292799 | g/t | g | K |
| 281424 | 74319 | 19 | 10293919 | c/t | t | Y |
| 281423 | 76893 | 19 | 10296493 | c/t | t | Y |
| 281422 | 77755 | 19 | 10297355 | t/c | t | Y |
| 281420 | 79354 | 19 | 10298954 | a/g | a | R |
| 3745263 | 80901 | 19 | 10300501 | a/g | c | Y |
| 3745262 | 80940 | 19 | 10300540 | t/c | a | R |
| 3745261 | 81111 | 19 | 10300711 | t/c | a | R |
| 3181049 | 82517 | 19 | 10302117 | t/c | g | R |
| 281412 | 82874 | 19 | 10302474 | t/c | t | Y |
| 3181048 | 84978 | 19 | 10304578 | a/g | t | Y |
| 2230399 | 86003 | 19 | 10305603 | c/g | c | S |
| 2278442 | 86226 | 19 | 10305826 | g/a | g | R |
| 3181047 | 87206 | 19 | 10306806 | a/g | c | Y |
| 3181046 | 87535 | 19 | 10307135 | t/c | a | R |
| 2304237 | 87968 | 19 | 10307568 | t/c | t | Y |
| 281413 | 88134 | 19 | 10307734 | g/a | g | R |
| 1058154 | 88297 | 19 | 10307897 | a/c | c | M |
| 3176769 | 88434 | 19 | 10308034 | t/c | a | R |
| 2304238 | 90602 | 19 | 10310202 | g/a | a | R |
| 2304239 | 90750 | 19 | 10310350 | t/c | c | Y |
| 2304240 | 90792 | 19 | 10310392 | g/a | a | R |
| 3176768 | 91065 | 19 | 10310665 | a/g | c | Y |
| 3176767 | 91151 | 19 | 10310751 | c/a | t | K |
| 3176766 | 91178 | 19 | 10310778 | c/t | g | R |
| 281414 | 91685 | 19 | 10311285 | g/a | g | R |
| 281415 | 92393 | 19 | 10311993 | t/g | g | K |

Assay for Verifying and Allelotyping SNPs

[0285] The methods used to verify and allelotype the proximal SNPs of Table 9 are the same methods described in Examples 1 and 2 herein. The PCR primers and extend primers used in these assays are provided in Table 10 and Table 11, respectively.

TABLE 10

| | | |
|---|---|---|
| dbSNP rs# | Forward PCR primer | Reverse PCR primer |

| | | |
|---|---|---|
| 2884487 | ACGTTGGATGTGTGGCAAATGATGGAACAG | ACGTTGGATGCCAGAAGTTTGAGATCTGCC |
| 2358580 | ACGTTGGATGTCGCGTGCGTGACGTCATCC | ACGTTGGATGCGGGAGGTCAAGGCCACTG |
| 2304236 | ACGTTGGATGTCACATCAACAGTGGTACGG | ACGTTGGATGAGCCTGCCCTACAGCGACTT |
| 1059840 | ACGTTGGATGTCGGCCTGGCTCAGAAGAGG | ACGTTGGATGACCCCTACCCCACGCTACCCA |
| 1059843 | ACGTTGGATGCCACCCCGTACCACTGTTGA | ACGTTGGATGTGAGGCTCCCAAGTCGGCCA |
| 11115 | ACGTTGGATGAGGTGACACCTTCCTCGAAG | ACGTTGGATGTGTGAAGCACCTCTTCTGAG |
| 1059849 | ACGTTGGATGGGAATGGATGCAGAAGCCCG | ACGTTGGATGAAGCTGAGGCCACAGGGAG |
| 1059855 | ACGTTGGATGAAAAACAAAAAGAGGGAATG | ACGTTGGATGGGCCATCGCCATTGGGAAG |
| 5030386 | ACGTTGGATGTTGAACTCCTGGGCTCAAGT | ACGTTGGATGAGACAAAAATCCACCTGGGC |
| 5030339 | ACGTTGGATGTCAAGTGATCCTCCCATCTC | ACGTTGGATGGGACACAGGAATGAACAGAG |
| 5030387 | ACGTTGGATGAAGAACGGCACCATTGTGGC | ACGTTGGATGTTCCACTGAGCTCTTGCCCC |
| 5030388 | ACGTTGGATGTCGGAGATCTCCATGGCGA | ACGTTGGATGACCACGTCGAGGCTGGGTAC |
| 1799766 | ACGTTGGATGGTTTCCCCGCGGAGCCTGG | ACGTTGGATGTCCCTACGCGCCGAGCCCC |
| 5030389 | ACGTTGGATGAAAAGGAAGGAAGCTGCGTG | ACGTTGGATGAAGCTAGCTGCCTCAGTTTC |
| 5490 | ACGTTGGATGCCTCTGCTACTCAGAGTTGC | ACGTTGGATGACTCACCTGGGAACAGAGC |
| 11575070 | ACGTTGGATGTAGCCTTACCTCCTGCCTCA | ACGTTGGATGACGCAATCTAGCCAAGCAAG |
| 5030340 | ACGTTGGATGATGAGAGGTGTGAACCACCG | ACGTTGGATGTGGCCGCTATAACGTTTCCC |
| 5030390 | ACGTTGGATGTTATCCGTGGCCCAAAGCTG | ACGTTGGATGAAAGACCCTCTGACCCCTTC |
| 5030391 | ACGTTGGATGTGTAAGTTTGGGGAACCAGG | ACGTTGGATGCTGGATCTCAGGCTTTGTTG |
| 3093035 | ACGTTGGATGGGAGACATAGCGAGATTCTG | ACGTTGGATGTAGAAAGCAGTGCGATCTGG |
| 11667983 | ACGTTGGATGATCTTTGAGTGAGGCAGTGC | ACGTTGGATGAGGGGCTTATTTGGATCAGG |
| 5030341 | ACGTTGGATGGAATCTGAGGGACCTGATCC | ACGTTGGATGTTGCAGTGAGCCGAGATCAC |
| 5030342 | ACGTTGGATGTTTTTGAGACGGAGTCTCAC | ACGTTGGATGAGGAGAATCGTTTGAACCTG |
| 5030343 | ACGTTGGATGTGTAGTCCCAGCTACTCAGG | ACGTTGGATGTGATCTCGGCTCACTGCAAC |
| 5030344 | ACGTTGGATGAAGAAGTCAGGTGGAGACAG | ACGTTGGATGAAATTGAGGCCCAAAGAGGG |
| 5030347 | ACGTTGGATGAATCTCAGCTCACTGCAACC | ACGTTGGATGGCCTGTAATCCCAGATACTC |
| 5030348 | ACGTTGGATGGGAGAATCACTTGAACCCGG | ACGTTGGATGAGTCTCGCTTTGTCACTCAG |
| 5030349 | ACGTTGGATGTCTCGCTTTGTCACTCAGAC | ACGTTGGATGAATCACTTGAACCCGGGAGG |
| 5030350 | ACGTTGGATGCACTGAAGGCCATGCTAAAG | ACGTTGGATGACTCCAGTCTGAGTGACAAA |
| 5030351 | ACGTTGGATGTGCCAGGTCCTAGAAGAAAC | ACGTTGGATGCGCACATTCCCTTGATGAAC |
| 5491 | ACGTTGGATGTGACATGCAGCACCTCCTGT | ACGTTGGATGGGAGCAACTCCTTTTTAGGC |
| 5030352 | ACGTTGGATGTACGAGCAAGTGGCAAAGATT | ACGTTGGATGTGAGTAACTGAGCCCGGAGG |
| 5030353 | ACGTTGGATGTACTGTGAGTAACTGAGCCC | ACGTTGGATGAGCAAGTGGCAAAGATTCCC |
| 10420063 | ACGTTGGATGATCTCCTGACCTTGTGATCC | ACGTTGGATGGCCCTGGGATGGCATTTTTC |
| 11879117 | ACGTTGGATGTGGTCAGGCTGGTCTCGAACT | ACGTTGGATGAAATGTCATGGGCTGGGCAC |
| 5030354 | ACGTTGGATGCTCTCTTCTCATAGCCAGCT | ACGTTGGATGATTAGGGAAGGGCAGTTTCG |
| 5030355 | ACGTTGGATGGGCCGGAGAATCACTTAAAC | ACGTTGGATGAGAGTTTCACTCTTGTTGCC |
| 281428 | ACGTTGGATGAGTAGCTGGAATTACAGGCG | ACGTTGGATGGCCAACATGATGAAATCCCG |
| 5030358 | ACGTTGGATGCACAAGGTCAGGAGATCAAG | ACGTTGGATGCCACGCCTGGCTAATTTTTG |
| 5030359 | ACGTTGGATGCCAAAGTGCTGGGATTACAG | ACGTTGGATGAAGTCCCCAAAGTAGGAAGG |
| 5030392 | ACGTTGGATGTTCGAAGTCCCCAAAGTAGG | ACGTTGGATGAAAGTGCTGGGATTACAGGC |
| 5030393 | ACGTTGGATGTAGTCCCAGCTACTCAGGAG | ACGTTGGATGTGTCATCACGGCTCACTACA |
| 5030360 | ACGTTGGATGTGTAGTGAGCCGTGATGACA | ACGTTGGATGTCCCAAAGCTACTTGGCCAG |
| 5030394 | ACGTTGGATGTGAGCAGATGCTGACCTTCC | ACGTTGGATGAAGACCTTCAAAGAGGTTTC |
| 281429 | ACGTTGGATGCGACAGAGCAAGACTGTGTG | ACGTTGGATGCTTTTCTGCATCTCTGCCTG |
| 5030361 | ACGTTGGATGTATGCTCTCAGCTATCAGGC | ACGTTGGATGACTCTAGACCTCTGGTGATC |
| 5030362 | ACGTTGGATGCCACAGTCATAGAGGGAGAA | ACGTTGGATGCCTGATAGCTGAGAGCATAG |
| 281430 | ACGTTGGATGATTACAGGTGTGAGCCACTG | ACGTTGGATGGCAGGGAGAAATCTTGATGG |
| 281431 | ACGTTGGATGACTGGGATTACAGGTGTGAG | ACGTTGGATGGGAGAAATCTTGATGGAGGC |
| 5030395 | ACGTTGGATGAACTACTCTGGAGGCTCAAG | ACGTTGGATGCAGAGTGAGACTCCATCTCA |
| 5827095 | ACGTTGGATGCCCTTCCTCCCATCAATCAA | ACGTTGGATGATTGCACCACTGCATTCCAG |
| 281432 | ACGTTGGATGTCAGCTATCTAATCCCTGGC | ACGTTGGATGAGCTGGGACTTTCCTTCTTG |
| 5030364 | ACGTTGGATGTTCTTGAATACGGTCACTGC | ACGTTGGATGCTGAAGGCTGGATTTACTGG |
| 5030365 | ACGTTGGATGAGCTGGAGGTCAGAGTTTTC | ACGTTGGATGCCTGAGACCCTGTCTCTAAA |
| 5030368 | ACGTTGGATGTCATCTGAGGTTGGGAGTTC | ACGTTGGATGCGACACCACACAAGGCTAAT |
| 5030369 | ACGTTGGATGAGGTGGATCATCTGAGGTTG | ACGTTGGATGGACAGGGTTTCTCCATGTTG |
| 3073809 | ACGTTGGATGACCGTGCCCGGCCTTTTTTT | ACGTTGGATGATCGAACCACTGCACTCCTG |
| 2358581 | ACGTTGGATGTAAGGCAGGAGGATGGAGTG | ACGTTGGATGGACAGAGTCTCACTCTGTCG |
| 7258215 | ACGTTGGATGGTTTCACCGTGTTAGCCAGG | ACGTTGGATGACATGGTGGCTCACGCCTGTA |
| 5030371 | ACGTTGGATGACTGGGATTACAGATGTGAG | ACGTTGGATGGTGCTTAAAAGGGATGAATC |
| 5030372 | ACGTTGGATGGTACATAAGCAGGAGGTTTC | ACGTTGGATGTCTGTACAAACAACCATGAC |
| 281433 | ACGTTGGATGACAGAGTCGCTGTACATAAG | ACGTTGGATGGTACAAACAACCATGACTAC |
| 5030374 | ACGTTGGATGTGTACAGCGACTCTGTCTAC | ACGTTGGATGCTCTGAACCTCAGTTTCCTG |
| 5030375 | ACGTTGGATGTCTCCTACCTTTAATAGCCC | ACGTTGGATGTTCTTTGCTGTGGGTAAGTG |
| 5030397 | ACGTTGGATGCTGGGTATCAAATGCAGGAC | ACGTTGGATGAGAGTGAGAGTCTCTCTCAG |
| 281434 | ACGTTGGATGTAATCCCAACACTTTGGGGG | ACGTTGGATGAACACCACGCCTGGCTAATT |
| 12462944 | ACGTTGGATGTTTCACTATATTGGCCAGGC | ACGTTGGATGTGTAATCCCAACACTTTGGG |
| 5030398 | ACGTTGGATGCCACACGCAGCCTTTTTGTT | ACGTTGGATGGAACTGTGATCATGCCACTG |
| 5030378 | ACGTTGGATGAGGCTTGTCTTGAACTCCTG | ACGTTGGATGTGATGGCTCAGGCTGTAATC |
| 12459133 | ACGTTGGATGAAAGTGCTAGGATTACAGCC | ACGTTGGATGTAAATGAGCCTGGCCTAGAC |
| 5030399 | ACGTTGGATGAGGTCCACTTCACCAGACAC | ACGTTGGATGTAAGGTTCTTGCCCACTGGC |
| 5492 | ACGTTGGATGACCGTGGTCGTGACCTCAG | ACGTTGGATGAACCTCACCGTGGTGCTGCT |
| 1800019 | ACGTTGGATGACAGCCCGTCCAGGGAACA | ACGTTGGATGTCCTAGAGGTGGACACGCA |
| 1799969 | ACGTTGGATGTCAACCTCTGGTCCCCCAGTG | ACGTTGGATGAGGGGACCGTGGTCTGTTC |
| 5493 | ACGTTGGATGTCCTAGAGGTGGACACGCAG | ACGTTGGATGTGGACCTGGGCCTCCGAGACT |
| 5030381 | ACGTTGGATGTATGGCAACGACTCCTTCTC | ACGTTGGATGTATTACTGCACACGTCAGCC |
| 5494 | ACGTTGGATGTAAGGCCTCAGTCAGTGTGA | ACGTTGGATGAGTATTACTGCACACGTCAG |
| 3093033 | ACGTTGGATGAAAGCCTGGAATAGGCACAC | ACGTTGGATGTGCAGACAGTGACCATCTAC |
| 5495 | ACGTTGGATGTCACACTTCACTGTCACCTC | ACGTTGGATGTGTGCCTATTCCAGGCTTTC |
| 1801714 | ACGTTGGATGCTAGAGCCAAGGTGACGCTG | ACGTTGGATGTGGCCTTCAGCAGGAGCTGG |
| 2071441 | ACGTTGGATGAGCTTCTCCTGCTCTGCAAC | ACGTTGGATGTCACACAGGACACGAAGCTC |
| 5496 | ACGTTGGATGAAGGTCTTGCCTCCAAGTCC | ACGTTGGATGACAATCCCTCTCGTCCAGTC |
| 5497 | ACGTTGGATGCTCCATGTCATCTCATCGTG | ACGTTGGATGAATTTTCTGGCCACGTCCAG |
| 5030382 | ACGTTGGATGCTCACAGAGCACATTCACGG | ACGTTGGATGAGATCTTGAGGGCACCTACC |
| 5030400 | ACGTTGGATGGGACCTAATGCAATCCTCAC | ACGTTGGATGGCTACCACAGTGATGATGAC |
| 2071440 | ACGTTGGATGACTGCCACCAATATGGGAAG | ACGTTGGATGAAACCGAACACACAAGCCAC |
| 5499 | ACGTTGGATGGGAAGACATATGCCATGCAG | ACGTTGGATGATCTGACTGAGGACAATGCC |
| 3093032 | ACGTTGGATGGGCCACTTCTTCTGTAAGTC | ACGTTGGATGCATGAGGACATACAACTGGG |
| 1057981 | ACGTTGGATGGTACAACTGTACCTGGTGAC | ACGTTGGATGAATGAACATAGGTCTCTGGC |
| 5500 | ACGTTGGATGTTGTACAGGTTGTACACTGC | ACGTTGGATGAGGTTGGCCAATGAGAAGTC |
| 5501 | ACGTTGGATGCTGTGAACCATTACCAGTCC | ACGTTGGATGACTTCTCATTGGCCAACCTG |
| 5030383 | ACGTTGGATGATATTCCCTGGGCACTCATG | ACGTTGGATGTCCCCACCCACATACATTTC |
| 281436 | ACGTTGGATGCATGGTTCACTGCAGTCTTG | ACGTTGGATGTGTGGTGTTGTGAGCCTATG |
| 923366 | ACGTTGGATGAGGAAGTCTGGGCAATGTTG | ACGTTGGATGATAGGCTCACAACACCACAC |
| 281437 | ACGTTGGATGATAGGCTCACAACACCACAC | ACGTTGGATGAACACAAAGGAAGTCTGGGC |
| 3093030 | ACGTTGGATGAGAGACCCAGAAGGTCATAG | ACGTTGGATGCCTCCCCCAAGAAAACATTG |
| 5030384 | ACGTTGGATGTGCGCAGGAAAAACACGCTG | ACGTTGGATGACTGTCAACTACCCTTCCCC |
| 5030385 | ACGTTGGATGATTAGGAACGGAACACAGGG | ACGTTGGATGAGAGAGTTATGACCCCGAGA |
| 3810159 | ACGTTGGATGTTGCGATCACTTTCTCCAAG | ACGTTGGATGCTGAGTGAGGAAACCTCAGG |
| 281438 | ACGTTGGATGACCTGAGGTTTCCTCACTCAG | ACGTTGGATGAGAGGTTTCTGTGACACCCG |
| 3093029 | ACGTTGGATGGGCAGCTCTGATTGGATGTT | ACGTTGGATGCTCCACAGTTGTTTGGCCTC |
| 2735442 | ACGTTGGATGATGCTTTTGACTCCGCTTCC | ACGTTGGATGATGTTCTGGTAGTCACCCAG |
| 2569693 | ACGTTGGATGCTTGTTCTCGCGTGGATGTC | ACGTTGGATGTACTCAGCGTGTGTGAGCTC |
| 281439 | ACGTTGGATGGCGGAGCCATACCTCTAAGC | ACGTTGGATGTCGCTGGCACTTTCGTCCC |
| 281440 | ACGTTGGATGCTGGCTGAGATGCCATGATA | ACGTTGGATGATGGTGGGAGGAGCTAAATG |
| 2569694 | ACGTTGGATGCGCCCCCTCCTTGGAAACC | ACGTTGGATGGCGCGGCGGGTGGGGTGTG |
| 11575073 | ACGTTGGATGGCTCTTCGGCCTCTCAGGT | ACGTTGGATGAGGCCGTTTCTCAGGTCCAG |
| 2569695 | ACGTTGGATGAGTCCCTGGACCTGAGAAAC | ACGTTGGATGAGAAGACTCAGGCTCGAGGT |
| 2075741 | ACGTTGGATGAAGATGCCAGTCCGTGGACC | ACGTTGGATGAGTGTCTCTCCTGTCCGCTC |
| 11575074 | ACGTTGGATGTACCTCCTTACGCTGTGCTG | ACGTTGGATGAGTTGGAGAGATGGAGTCTT |
| 2569696 | ACGTTGGATGAACTACCCTGACTCAGAGGC | ACGTTGGATGCTGGGCTCATGGAAGGAACC |
| 2735439 | ACGTTGGATGTTCCTTCCATGAGCCCAGCC | ACGTTGGATGGGTCAAGGATCAGGAAGGAC |
| 2569697 | ACGTTGGATGTGTCTCTGGGACGTGGTAGC | ACGTTGGATGTTTCCTCTCCTCTACGCCCT |
| 2075742 | ACGTTGGATGAGCCAGGGAAAGAACCCAGG | ACGTTGGATGTTTAGACTCTGGGAGTGCGC |
| 2569698 | ACGTTGGATGTTTAAACCGGAGGCCTGGGC | ACGTTGGATGTCAAGGGTTCTCAGAGGGCG |
| 11669397 | ACGTTGGATGGGCTGAATTGCAGCACCAAC | ACGTTGGATGAACCAACGCAAACCCCTCTG |
| 901886 | ACGTTGGATGATCAGCTCTACGCGATCTGG | ACGTTGGATGTTCAGGCCCCACCTTCTGTTC |
| 885742 | ACGTTGGATGCCTAAGCACTTGACATGCAC | ACGTTGGATGATGCTGACCCCGACTTCAAC |
| 2569699 | ACGTTGGATGAATGCTGACCCCGACTTCAA | ACGTTGGATGGCACTTGACATGCACTATCT |
| 11549918 | ACGTTGGATGTTTTCGCCCCCCAGGGTGAC | ACGTTGGATGACAGCCACAGCTAGCGCAGA |
| 2569700 | ACGTTGGATGGGGACCTCAGTACCGGAACA | ACGTTGGATGCTCCCCAGCGATTACGTCTC |
| 2228615 | ACGTTGGATGGGGCAGATGGTGACAGTAAC | ACGTTGGATGTGGAACTCCCTCCAGTGTGA |
| ICAM-AA | ACGTTGGATGACCTTCTGGTGACTTCCAAG | ACGTTGGATGAGACGTAAGAAATGGCTCCG |
| 2569701 | ACGTTGGATGCCAGACCTTGAACCAGATAG | ACGTTGGATGTCAAGGACGTAACGCTAACG |
| 2569702 | ACGTTGGATGACCCTCCAGACCTTGAACCA | ACGTTGGATGACGTAACGCTAACGGTGGAG |
| 2735440 | ACGTTGGATGTAGTCGAGCCATGCACTCTG | ACGTTGGATGGGCAGTCCAGAGTGTTTAAG |
| 2569703 | ACGTTGGATGTCAGGAAGCTCCCAGACAGA | ACGTTGGATGATAACCCTTGGACGCCGATC |
| 10418913 | ACGTTGGATGCCAAAGCCAACAATACACTC | ACGTTGGATGCAGCCAAGTAATGCGTTCTG |
| 1056536 | ACGTTGGATGATTCTGGGAGCTCTGGGACT | ACGTTGGATGAGCCAAGCGTGAAGTGCGTG |
| 2569704 | ACGTTGGATGGATTCATCCATCTCCGGTGG | ACGTTGGATGTCCAGGCACTCCCTGACATC |
| 11673661 | ACGTTGGATGAAGCGATTCTCCTGCCTCAG | ACGTTGGATGTGGCGAAAACCCGTCTCTAC |
| 10402760 | ACGTTGGATGAAGAGGATCCTGCCTCCTAT | ACGTTGGATGGAAGGGCGAGGAATTTTAGC |
| | ACGTTGGATGTGCGCCCAGGAGGAAACTTC | ACGTTGGATGCAGCTGATCTGGGCTGGAG |
| 2569706 | ACGTTGGATGCTGTTGTTGCTCGACAGGCC | ACGTTGGATGTGGCCTCCAGCCCAGATCA |
| 2569707 | ACGTTGGATGTGAGCGTGGCAGGCGCCATG | ACGTTGGATGGCGTGGCGCCCGTGCGCGT |
| 2436545 | ACGTTGGATGGGCGCATCACGGTGCGCGT | ACGTTGGATGAAGACCCAGGTCACGCCCCC |
| 2436546 | ACGTTGGATGTCTCAGATACCTCGCCCCGC | ACGTTGGATGCGCATCACGGTGCGCGTGG |
| 2916060 | ACGTTGGATGGGCGAGGTATCTGAGAGGG | ACGTTGGATGTACTCTGTCCCACTTCCGTC |
| 2916059 | ACGTTGGATGGGGCGAGGTATCTGAGAGG | ACGTTGGATGCTTTGACTTCTACTCTGTCC |
| 2916058 | ACGTTGGATGTCAAAGTGCGATCAACAGCC | ACGTTGGATGCTCTCGGTCCCGGTAGACT |
| 2569708 | ACGTTGGATGCGGTAGACTAGACGGAAGTG | ACGTTGGATGAAAGTGCGATCAACAGCCCC |
| 735747 | ACGTTGGATGATCTTCCCCACAGTGGATTG | ACGTTGGATGACTGCTGCAGGAAAGGACTT |
| 885743 | ACGTTGGATGTGAGAGAAGGCGATCTTGAC | ACGTTGGATGCCAATTCACAATCCACTGTG |
| 710845 | ACGTTGGATGAGGCCGAGAGCTCAGGCGAG | ACGTTGGATGTCGGGTCCGCCCTCCGCGCCT |
| 2569709 | ACGTTGGATGTATTCAACTCCAAGGGCGTC | ACGTTGGATGAGAAACAGAAGCGGAGACAG |
| 2569710 | ACGTTGGATGACCCCCATTTTCTACCCATC | ACGTTGGATGTTGCAGAAACAGAAGCGGAG |
| 2569711 | ACGTTGGATGTGTCTCCGCTTCTGTTTCTG | ACGTTGGATGTGAATAACTCGGGAGGTCAC |
| 2569712 | ACGTTGGATGACCCCAGGCCCTCTCAAAAA | ACGTTGGATGTCTGCAAGGTGGAACAAGCC |
| 12610026 | ACGTTGGATGCGGTGGCTCATGCGTGTAAT | ACGTTGGATGCTCCCGAATAGCTGGGACTA |
| 4804129 | ACGTTGGATGTAACACGGTGAAACCCCGTC | ACGTTGGATGTGAGTAGCTGGGACTACAGG |
| 12150978 | ACGTTGGATGAGACAGCAAGACTCCGTCTC | ACGTTGGATGCCCGCCTTAGTTTCCCAAAG |
| 439843 | ACGTTGGATGTGGCTAACATGGTGAAACCC | ACGTTGGATGTTGAGTAGCTGGGACTACAG |
| 892188 | ACGTTGGATGGTTTGTTTTTAGAGACAGGG | ACGTTGGATGGTCAAAGCCACTTCCAGCTA |
| 2291473 | ACGTTGGATGAAGAGGCTATGTGGCAGATG | ACGTTGGATGAGGGTGAAGCTGGGTTTAAC |
| 281416 | ACGTTGGATGTAACGTAGAGCACAGGTGAG | ACGTTGGATGCAACGCAAACACCAGTGTGG |
| 281417 | ACGTTGGATGAAGAGACAGTGGAGAGGCTG | ACGTTGGATGAGAGCCATCGGGTCCCAGCAA |
| 882589 | ACGTTGGATGTCGATAACCCCAGCAAAGAG | ACGTTGGATGTAAGGCCAAACCCCATTCCC |
| 1048941 | ACGTTGGATGAGATTGTGCTGACACCGGAG | ACGTTGGATGCCACGTAGAAGTTCCTGGTG |
| 281418 | ACGTTGGATGTGCGCTCAGTCAGCTTCCTC | ACGTTGGATGAGTGTTAGCCGAGGGCAAGC |
| 430092 | ACGTTGGATGGTTGGGATTACAGGCATGAG | ACGTTGGATGATCTGTTGCCTGTCAAGATG |
| 368835 | ACGTTGGATGGGTGGGAAAAAGACGTGAAG | ACGTTGGATGAGAGGGAATTAAGGAGGTCC |
| 2358583 | ACGTTGGATGAAGACGTGAAGAGACACACC | ACGTTGGATGAGAGGGAATTAAGGAGGTCC |
| 378395 | ACGTTGGATGACTTGGCCCCCTGCACTCACA | ACGTTGGATGACCGTGTTTTCCAGGCTCGCG |
| 395782 | ACGTTGGATGATGCATGTCATGGCCGCCTC | ACGTTGGATGTTCCACCAGGTGCCCCTGGCA |
| 1045384 | ACGTTGGATGTTCAACAAGCGAGTGACAGC | ACGTTGGATGGTGCAGAGATGGGCTTTCTC |
| 281427 | ACGTTGGATGGACAATTGTAGTACCCAGCC | ACGTTGGATGAGGAGAATCGCTTGAACCTG |
| 3745264 | ACGTTGGATGCAAAGTGCTAGGATCACAGG | ACGTTGGATGACTGCCCCATAGAGTGGCAA |
| 281426 | ACGTTGGATGATCCTCACACCTCAGTCTCC | ACGTTGGATGAATGAGACTCCGTCTCTACC |
| 281425 | ACGTTGGATGCCAGCGGCCCAGCTCACTC | ACGTTGGATGTCTGAGGCCAGAGCCTCGGA |
| 281424 | ACGTTGGATGACCTGTGTTTCTAGGTGTGC | ACGTTGGATGCATGCCTGGGAAAAAACTCC |
| 281423 | ACGTTGGATGAACCTCAAGCTGCTTCACTG | ACGTTGGATGGAGGAGCCCACCTTTAATGT |
| 281422 | ACGTTGGATGAGAAATCCTCCTACCTTGGC | ACGTTGGATGGCCCGGCCTCTACATAAAAT |
| 281420 | ACGTTGGATGCCAGGACTGTCTCTCTGTTT | ACGTTGGATGATGACACTACAGCCTGAGCA |
| 3745263 | ACGTTGGATGTACATGAAGAAGGACTCGGC | ACGTTGGATGATCCGTCCAGTGCACGTAGA |
| 3745262 | ACGTTGGATGGCAGCCGAGTCCTTCTTCAT | ACGTTGGATGTTCCTGGTCTACAGTGAGCG |
| 3745261 | ACGTTGGATGACACACAGCAGGGCATCCGT | ACGTTGGATGCGCAATCAATGCTTTCCACC |
| 3181049 | ACGTTGGATGATCTTCAGGGATGGTCACTC | ACGTTGGATGGACAAATACAAAGGGACAGG |
| 281412 | ACGTTGGATGTGACCTCAGGTGATTCACCC | ACGTTGGATGGGTATACCTTTAGCTGGCTG |
| 3181048 | ACGTTGGATGCTTTTCTCCACCCACTCTAC | ACGTTGGATGTAAACGCGTGATATGGAGGG |
| 2230399 | ACGTTGGATGAGCGGCAGTTACCATGTTAG | ACGTTGGATGTTCTTCCCCCATTGCTTCTG |
| 2278442 | ACGTTGGATGGGTGATGGACATTGAGGGTG | ACGTTGGATGTCCCTTCTGTCTCCAACCC |
| 3181047 | ACGTTGGATGGAATGCGACAGTCATGAACC | ACGTTGGATGCCCCTAGGGTCACGTTGCA |
| 3181046 | ACGTTGGATGTATCTTGCTGACTGGGTCAC | ACGTTGGATGCGTGGGATCTTTGAAGAAGG |
| 2304237 | ACGTTGGATGTGGGCCAGAACTTCACCCTG | ACGTTGGATGAAGCAGCACCACCGTGAGG |
| 281413 | ACGTTGGATGTCAAAGCTCACAGTTCTCGG | ACGTTGGATGACTTAGCGGGTCCTGCAAAC |
| 1058154 | ACGTTGGATGTCCCTTCCATCCTCATTTTT | ACGTTGGATGTGCAAGGCGCTAAACAAAAC |
| 3176769 | ACGTTGGATGTTCCTGTTTATGGCCAGACG | ACGTTGGATGGTCTGAACCTGATTGGAGAG |
| 2304238 | ACGTTGGATGCCTGGACATTTGTGTGTGAG | ACGTTGGATGCATGAGATTGAGATGCGTC |
| 2304239 | ACGTTGGATGCAGGCTCCTCTAACATCACC | ACGTTGGATGACACCACTACCCAAGACCAG |
| 2304240 | ACGTTGGATGAATCTCAGCAACGTGACTGG | ACGTTGGATGACACGGTGATGTTAGAGGAG |
| 3176768 | ACGTTGGATGGAGAGGTGTTAAATGGTGGG | ACGTTGGATGGGAACATGAAGAAGTCCTGG |
| 3176767 | ACGTTGGATGCGGTCTCTGATGGATTCTAC | ACGTTGGATGAACAGGCCCCACCATTTAAC |
| 3176766 | ACGTTGGATGTTTCGGGCTGCAATGGTCCC | ACGTTGGATGTAACACCTCTCTCCTTGTGC |
| 281414 | ACGTTGGATGAAGGCACCTTCCTCTGTCAG | ACGTTGGATGTGGGCCACAACACGGATGGTA |
| 281415 | ACGTTGGATGGCACAAAGAGCTAAGGTAGG | ACGTTGGATGGAATCCTGGATAGACAGTGG |

[0286] TABLE 11

| | | |
|---|---|---|
| dbSNP rs# | Extend Primer | Term Mix |

| | | |
|---|---|---|
| 2884487 | AGAGACAGGGTCTCGCC | ACT |
| 2358580 | TCATCCAGCGGCGCCTCGC | ACT |
| 2304236 | GCCCTGGGTAGCGTGGGG | ACT |
| 1059840 | GCTCAGAAGAGGTGCTTCAC | CGT |
| 1059843 | CTGTTGATGTGAAGCACCTCTT | ACG |
| 11115 | AAGGGTGGGCGTGGGCCT | ACT |
| 1059849 | CAGAAGCCCGTCTGGGCT | ACG |
| 1059855 | AAAAAGAGGGAATGGATGCA | ACT |
| 5030386 | CCTGGGCTCAAGTGATCCT | ACT |
| 5030339 | GCTGGGATTACAGGTGGGA | ACT |
| 5030387 | TTGTGGCTGCAAGTGGGAC | ACT |
| 5030388 | CGCGCCCCACAACAGGAAA | ACT |
| 1799766 | GCGGAGCCTGGGACGCC | CGT |
| 5030389 | GCGCCGAGCCCCTCCGC | ACT |
| 5490 | CTACTCAGAGTTGCAACCTC | CGT |
| 11575070 | CCTGCCTCAGCCTCCCGA | ACT |
| 5030340 | GCGTCTCTTACAGTTTCTCAG | ACG |
| 5030390 | CCAAAGCTGAGAAGTGGGAC | ACT |
| 5030391 | GGGGAACCAGGAGGGTGG | ACT |
| 3093035 | TTCTGTCTCAAAAAACAAAGC | ACT |
| 11667983 | CCTTCGGAGGCAGCAGAAT | ACG |
| 5030341 | TTTTTGAGACGGAGTCTCACT | ACT |
| 5030342 | GACGGAGTCTCACTCTGTC | ACT |
| 5030343 | GCTACTCAGGGAGGCTGAG | ACT |
| 5030344 | CTCCTCACTCCCTGAGACA | ACG |
| 5030347 | CTGCCTCCCGGGTTCAAGT | ACT |
| 5030348 | CACTTGAACCCGGGAGGCA | ACT |
| 5030349 | CAGACTGGAGTGCAGTGGC | ACT |
| 5030350 | TGCTAAAGATGTGTTCTTTTATTT | CGT |
| 5030351 | GAAGAAACGAGGGAAGAGGC | ACT |
| 5491 | CCTCCTGTGACCAGCCCA | CGT |
| 5030352 | CTGCACGTCTCTCCCACC | ACT |
| 5030353 | GGTGGGAGAGACGTGCAG | ACT |
| 10420063 | CGCCCGGCCATCAATTCTTT | ACG |
| 11879117 | CCCTCAGCCTCCCAAAGTG | ACT |
| 5030354 | TGTCATTTCTCCCACTTCCTT | ACT |
| 5030355 | CAGGAGGTGAAGGTTGCGG | ACT |
| 281428 | GCGCCCAGCACCACGCC | ACG |
| 5030358 | CAGGAGATCAAGACCAGCC | ACG |
| 5030359 | AGCCACTGCCCCCAGCC | ACT |
| 5030392 | GTCCCCAAAGTAGGAAGGAC | ACT |
| 5030393 | AGGTGGGAGGATCACCTGA | ACT |
| 5030360 | CTCCAGCCTGGGTGACAGA | ACT |
| 5030394 | CAGGTGAGGGAAGTCCCC | ACT |
| 281429 | GACTGTGTGTCAAAAAAAA | ACT |
| 5030361 | TATCAGGCAGAGCCGCGC | ACT |
| 5030362 | AGAGGGAGAAATGTGGCAGA | ACT |
| 281430 | GAGCCACTGCACCTGGCC | ACG |
| 281431 | ACAGGTGTGAGCCACTGC | ACT |
| 5030395 | GGCTCAAGTGGGAGGATCA | ACG |
| 5827095 | CCATCAATCAATTTTTTTTTTTTTTT | CGT |
| 281432 | CTAATCCCTGGCCTGCTCA | ACT |
| 5030364 | GGACCATAGCCAACTGCTC | CGT |
| 5030365 | GGTCAGAGTTTTCTTGACTATAT | ACT |
| 5030368 | GAGACCAGCCTGACCAACA | ACG |
| 5030369 | TCATCTGAGGTTGGGAGTTC | ACT |
| 3073809 | CGGCCTTTTTTTTTTTTTTTTTTTTT | ACT |
| 2358581 | CTTGCAGTGAGCCCAGATCG | CGT |
| 7258215 | CGTGTTAGCCAGGATGGTCT | ACG |
| 5030371 | AGCCTVGCTTTCTTGAGATAC | ACT |
| 5030372 | GGTTTCTTTTTTAGAGTGATTGA | ACT |
| 281433 | GTACATAAGCAGGAGGTTTCTT | ACT |
| 5030374 | CTCTGTCTACCTCTTAAGTGA | CGT |
| 5030375 | GTTCAGGAAACTGAGGTTCAG | ACT |
| 5030397 | CAAATGCAGGACCCCCCC | ACT |
| 281434 | TCAAGACCAGCCTGGCCAA | ACG |
| 12462944 | ATATTGGCCAGGCTGGTCTT | ACT |
| 5030398 | CAGGGTCTTTCTTTCCCAGG | ACT |
| 5030378 | CCTGGCCTCAAGTGACCCT | ACT |
| 12459133 | CTGGCCAACAGGTTTTTTTTTTT | ACT |
| 5030399 | CCCCCACCTCTGTTTTCCT | ACT |
| 5492 | CTGGCTCCCGTTTCAGCTC | ACT |
| 1800019 | CGTCCAGGGAACAGACCAC | ACT |
| 1799969 | CCGAGACTGGGAACAGCC | ACG |
| 5493 | GGTCTGTTCCCTGGACGG | ACT |
| 5030381 | AGGCCTCAGTCAGTGTGAC | ACG |
| 5494 | TCAGTGTGACCGCAGAGGA | ACG |
| 3093033 | GGGTTCAGGTCACACCC | ACG |
| 5495 | CTCTGGCTTCGTCAGAATCA | ACG |
| 1801714 | CCAGCCCAGCCACTGGGCC | ACG |
| 2071441 | CGGCCAGCTTATACACAAGAA | ACG |
| 5496 | CACCTCCATGTCATCTCATC | ACT |
| 5497 | GTTTTTCCAGATGGCCCCC | ACT |
| 5030382 | CAGAGCACATTCACGGTCACCT | ACG |
| 5030400 | TCCTCCCCACAGCCCCC | ACG |
| 2071440 | GAGGAAGAGGCCCTGTCC | ACG |
| 5499 | GCCATGCAGCTACACCTAC | ACG |
| 3093032 | CTTCTGTAAGTCTGTGGG | ACT |
| 105798 | TTACCTGGTGACCTTGAATGTGAT | ACG |
| 5500 | GAGTGCCTGGCAAAAAGATCA | ACT |
| 5501 | CCATATAGTGCTTTTGTGCCG | ACT |
| 5030383 | ACTCATGTCCAGACATGACC | ACT |
| 281436 | ACTGCAGTCTTGACCTTTTG | ACT |
| 923366 | TGCGAGACCCCGTCTCTG | ACT |
| 281437 | TTTTTTTTCCAGAGACGGGGTCT | ACG |
| 3093030 | CCAGAACCTCAGGGTATG | ACT |
| 5030384 | ATCACCGCCTACAGTGAGG | ACT |
| 5030385 | AGGGAGGTCTGTCGACCC | ACT |
| 3810159 | CCAAGTTCCTTGTCTCCCT | ACT |
| 281438 | CGAAGCCCCAGACTCTGTGTA | ACT |
| 3093029 | AGTTTCCTATCCCAGCC | ACT |
| 2735442 | GCTTTGACACCCCCCACC | ACT |
| 2569693 | CGCGTGGATGTCAGGGCC | ACG |
| 281439 | ACCCCTCCGGGTCAGCTCC | ACT |
| 281440 | TAATAAGCTGGACTCCGAGC | ACG |
| 2569694 | ATCCCCAAGCGCAACTCTG | ACG |
| 11575073 | CGGCCTCTCAGGTAAGAGC | ACG |
| 2569695 | CTCTGCCCTCGCCTCGCT | ACT |
| 2075741 | GTGGACCATGGTGCACAGCA | ACT |
| 11575074 | CTGTGCACCATGGTCCACG | ACT |
| 2569696 | TGTTCCCGCTCCACCCAGA | ACT |
| 2735439 | CAGCCTTGCGTCCCGGC | ACT |
| 2569697 | GGGACGTGGTAGCAGAGAG | ACT |
| 2075742 | AACCCAGGCGTCCCGCGTC | ACT |
| 2569698 | TGGGTTCTTTCCCTGGCTG | ACT |
| 11669397 | TTGCAGCACCAACTGCCCT | ACG |
| 901886 | AGAGTCCGCAGCTCTTTGAAC | ACT |
| 885742 | TGCACTATCTTATCGTATTATCA | ACG |
| 2569699 | CCCTCCGTGCCTTGAGGA | ACT |
| 11549918 | CCCAGGGTGACGTTGCAGA | ACG |
| 2569700 | TCAGTACCGGAACAGGCGTG | ACT |
| 2228615 | AGTAACCTGCGCAGCTGGG | ACT |
| ICAM-AA | TCCAAGGACCCGCCTGCT | ACG |
| 2569701 | CTTGAACCAGATAGAAATGCAC | ACG |
| 2569702 | CAGACCTTGAACCAGATAGAA | ACT |
| 2735440 | ACCAGTGGCGCCTTTTTCG | ACG |
| 2569703 | CTCCCAGACAGAGTGCATG | ACT |
| 10418913 | GCACCAGCGCTGGACAGC | ACT |
| 1056536 | GCAGCAGCACCCCCTCAGTGG | ACG |
| 2569704 | CTCCGGTGGCGCTGCAAA | ACT |
| 11673661 | GGACCACAGGCGCCCAC | ACT |
| 10402760 | CTCCTTCCCCGACAATCAG | ACT |
| | CACGTTGACCTGCCGCGC | ACT |
| 2569706 | GGCCGATGTTGAGGGCCC | ACG |
| 2569707 | GGCGAGTACGAGTGCGCA | ACT |
| 2436545 | ACGGTGCGCGTGGCCGGT | CGT |
| 2436546 | CCTCTCCCCAGCTGCCAC | ACT |
| 2916060 | CTCCCTCTCGGTCCCGG | ACT |
| 2916059 | CGGTCCCGGTAGACTAG | ACT |
| 2916058 | TTCTACTCTGTCCCACT | CGT |
| 2569708 | CTAGACGGAAGTGGGACAGA | ACT |
| 735747 | TGTGAATTGGGTCAAGTTTCC | ACT |
| 885743 | GACCCCTCTCTCCCTCCA | CGT |
| 710845 | AGGCGAGGCCGTGTGTCT | ACT |
| 2569709 | GGCGTCACCCCCATTTTCTA | ACT |
| 2569710 | TTTCTACCCATCCCCTCAATA | ACT |
| 2569711 | GTTTCTGCAAGGTGGAACAAG | ACT |
| 2569712 | GGCCCTCTCAAAAATCGCTT | CGT |
| 12610026 | AGCTGGGCATGGTGGTGC | ACT |
| 4804129 | AAACCCCGTCTCTACTAAAAAT | CGT |
| 12150978 | GCCAGGGCCGAGCACAGT | ACT |
| 439843 | ATGGTGAAACCCCGTCACTA | CGT |
| 892188 | TGGGCTGGAGCACAATGAC | ACT |
| 2291473 | GGAGTGTCCCTGGACCCC | ACT |
| 281416 | GGTCCACACCGACGCCAG | ACT |
| 281417 | CCCCTGCCCAGGACACCCC | ACT |
| 882589 | CCCCAGCAAAGAGAGGTCAT | ACT |
| 1048941 | GGAAGGAGCGGAATTCACCCT | ACT |
| 281418 | TCAGCTTCCTCCCTCCCC | ACT |
| 430092 | ATTACAGGCATGAGCCACTG | ACG |
| 368835 | AGACGTGAAGAGACACACCT | ACT |
| 2358583 | AAGAGACACACCTAATTTGTGG | ACT |
| 378395 | GCCCGCGTCCTCCTCTCC | CGT |
| 395782 | GCGTGAGTGCCAGGGTTCT | ACT |
| 1045384 | ACAATGTCCGACTCCCACA | ACT |
| 281427 | CTTTGTATACAATCTTCCCTC | ACG |
| 3745264 | ATACCATGCCAGGCATT | ACT |
| 281426 | GAGCTGGGACCACAGGCA | ACG |
| 281425 | CCAGCTCACTCCTCCCCC | CGT |
| 281424 | TAGGTGTGCGTGTGTGTGTG | ACG |
| 281423 | GCCCACCCTCCATTCAGC | ACG |
| 281422 | CTGGGGAACTACAGGAATGC | ACT |
| 281420 | ACTGTCTCTCTGTTTTTGAGAT | ACT |
| 3745263 | TCGGCTGCCCGTGCCAAGTC | ACT |
| 3745262 | GAGTCCTTCTTCATGTACTC | ACT |
| 3745261 | GCAGCTGCACCGACAGTTC | ACT |
| 3181049 | ACTCCCTGCCCTGGCCC | ACT |
| 281412 | GCTGGGATTATAAGCGTG | ACT |
| 3181048 | TACCACAGGGTGGCGGG | ACT |
| 2230399 | GTTACCATGTTAGGGAGGAGA | ACT |
| 2278442 | GGACATTGAGGGTGAGCTAA | ACG |
| 3181047 | CAGGAGGGTGCCCGGGA | ACT |
| 3181046 | ACTGGGTCACCCTTCTTC | ACT |
| 2304237 | TGCGCTGCCAAGTGGAGG | ACT |
| 281413 | GCTCACAGTTCTCGGCAGGAC | ACG |
| 1058154 | CTTCCATCCTCATTTTTTTTTATT | ACT |
| 3176769 | CGGGGTGGGTGGATCAA | ACT |
| 2304238 | CATTTGTGTGTGAGATACAAAGA | ACG |
| 2304239 | ATCACCGTGTACAGTGAGTC | ACT |
| 2304240 | GCTCAGTGTACTGCAATGGCTC | ACG |
| 3176768 | TGTTGATGCGTGGGTTGGGG | ACT |
| 3176767 | TGGATTCTACCTTTCCC | CGT |
| 3176766 | TCCTTCTGAGTTCTCCC | ACG |
| 281414 | CCTTCCTCTGTCAGAATGGC | ACG |
| 281415 | GGTGATTTGGGGACAGCTGA | ACT |

Genetic Analysis of Allelotyping Results

[0287] Allelotyping results are shown for cases and controls in Table 12. The allele frequency for the A2 allele is noted in the fifth and sixth columns for breast cancer pools and control pools, respectively, where “AF” is allele frequency. SNPs with blank allele frequencies were untyped.

TABLE 12

| | | | | | | | | Breast |
|---|---|---|---|---|---|---|---|---|
| | Position in | | | | | | | Cancer |
| | SEQ ID | Chromosome | A1/A2 | | | | | Associated |
| dbSNP rs# | NO: 1 | Position | Allele | Case AF | Control AF | p-Value | OR | Allele |
| 2884487 | 230 | 10219830 | T/C | T = 0.788 | T = 0.76 | 0.307 | 0.85 | T |
| | | | | C = 0.212 | C = 0.240 | | | |
| 2358580 | 4282 | 10223882 | A/G | A = | A = 0.474 | | | |
| | | | | G = | G = 0.526 | | | |
| 2304236 | 11844 | 10231444 | A/C | A = 0.986 | A = 0.995 | 0.335 | 2.92 | C |
| | | | | C = 0.014 | C = 0.005 | | | |
| 1059840 | 11890 | 10231490 | A/T | A = 0.19 | A = 0.203 | 0.602 | 1.09 | T |
| | | | | T = 0.810 | T = 0.797 | | | |
| 1059843 | 11905 | 10231505 | C/T | C = 0.999 | C = 0.999 | 0.96 | 1.26 | T |
| | | | | T = 0.001 | T = 0.001 | | | |
| 11115 | 11942 | 10231542 | T/C | T = 0.566 | T = 0.634 | 0.0401 | 1.33 | C |
| | | | | C = 0.434 | C = 0.366 | | | |
| 1059849 | 12054 | 10231654 | G/A | G = 0.754 | G = 0.804 | 0.0649 | 1.34 | A |
| | | | | A = 0.246 | A = 0.196 | | | |
| 1059855 | 12070 | 10231670 | T/C | T = 0.001 | T = 0.003 | 0.838 | 3.25 | C |
| | | | | C = 0.999 | C = 0.997 | | | |
| 5030386 | 21497 | 10241097 | C/G | C = 0.999 | C = 0.999 | 0.987 | 1.12 | G |
| | | | | G = 0.001 | G = 0.001 | | | |
| 5030339 | 21537 | 10241137 | A/G | A = 0.002 | A = 0.002 | 0.993 | 0.93 | A |
| | | | | G = 0.998 | G = 0.998 | | | |
| 5030387 | 21682 | 10241282 | T/G | T = 0.999 | T = 0.995 | 0.706 | 0.27 | T |
| | | | | G = 0.001 | G = 0.005 | | | |
| 5030388 | 22073 | 10241673 | A/G | A = 0.001 | A = 0.001 | 0.968 | 3.66 | G |
| | | | | G = 0.999 | G = 0.999 | | | |
| 1799766 | 22393 | 10241993 | C/— | C = 0.001 | C = 0.002 | 0.952 | 1.46 | — |
| | | | | — = 0.999 | — = 0.998 | | | |
| 5030389 | 22394 | 10241994 | A/— | A = 0.983 | A = 0.979 | 0.757 | 0.80 | A |
| | | | | — = 0.017 | — = 0.021 | | | |
| 5490 | 23227 | 10242827 | C/A | C = 0.001 | C = 0.001 | 1 | 1.00 | |
| | | | | A = 0.999 | A = 0.999 | | | |
| 11575070 | 23614 | 10243214 | C/G | C = 0.001 | C = 0.001 | 0.986 | 1.58 | G |
| | | | | G = 0.999 | G = 0.999 | | | |
| 5030340 | 23681 | 10243281 | C/T | C = 0.963 | C = 0.967 | 0.829 | 1.13 | T |
| | | | | T = 0.037 | T = 0.033 | | | |
| 5030390 | 23937 | 10243537 | A/G | A = 0.191 | A = 0.145 | 0.0748 | 0.72 | A |
| | | | | G = 0.809 | G = 0.855 | | | |
| 5030391 | 24037 | 10243637 | A/G | A = 0.012 | A = 0.044 | 0.0373 | 3.95 | G |
| | | | | G = 0.988 | G = 0.956 | | | |
| 3093035 | 24373 | 10243973 | A/G | A = 0.113 | A = 0.085 | 0.223 | 0.73 | A |
| | | | | G = 0.887 | G = 0.915 | | | |
| 11667983 | 24589 | 10244189 | C/T | C = 1.000 | C = 0.998 | 0.84 | 0.36 | C |
| | | | | T = 0.000 | T = 0.002 | | | |
| 5030341 | 24675- | 10244275\hat{ } | CT/— | CT = 0.691 | CT = 0.745 | 0.0746 | 1.30 | — |
| | 24676 | 10244276 | | — = 0.309 | — = 0.255 | | | |
| 5030342 | 24680 | 10244280 | T/G | T = 0.373 | T = 0.389 | 0.634 | 1.07 | G |
| | | | | G = 0.627 | G = 0.611 | | | |
| 5030343 | 24754 | 10244354 | T/C | T = 0.674 | T = | | | |
| | | | | C = 0.326 | C = | | | |
| 5030344 | 25053 | 10244653 | G/A | G = 1.000 | G = 1.000 | 0.952 | 0.35 | G |
| | | | | A = 0.000 | A = 0.000 | | | |
| 5030347 | 26004 | 10245604 | A/C | A = 0 | A = 0 | 1 | | |
| | | | | C = 1.000 | C = 1.000 | | | |
| 5030348 | 26023 | 10245623 | A/G | A = 0.076 | A = 0.072 | 0.843 | 0.95 | A |
| | | | | G = 0.924 | G = 0.928 | | | |
| 5030349 | 26046 | 10245646 | T/C | T = 0.832 | T = 0.819 | 0.618 | 0.92 | T |
| | | | | C = 0.168 | C = 0.181 | | | |
| 5030350 | 26100 | 10245700 | A/T | A = 1.000 | A = 1.000 | 1 | | |
| | | | | T = 0 | T = 0 | | | |
| 5030351 | 26817 | 10246417 | T/C | T = 0.002 | T = 0.002 | 0.998 | 1.02 | C |
| | | | | C = 0.998 | C = 0.998 | | | |
| 5491 | 26940 | 10246540 | T/A | T = 0.001 | T = 0.002 | 0.853 | 3.82 | A |
| | | | | A = 0.999 | A = 0.998 | | | |
| 5030352 | 27143 | 10246743 | G/C | G = 0.631 | G = 0.62 | 0.732 | 0.96 | G |
| | | | | C = 0.369 | C = 0.380 | | | |
| 5030353 | 27162 | 10246762 | A/G | A = 0.002 | A = 0.004 | 0.858 | 2.12 | G |
| | | | | G = 0.998 | G = 0.996 | | | |
| 10420063 | 28328 | 10247928 | G/A | G = 0.001 | G = 0.002 | 0.864 | 6.56 | A |
| | | | | A = 0.999 | A = 0.998 | | | |
| 11879117 | 28799 | 10248399 | G/C | G = 0.998 | G = 1.000 | 0.844 | 3.03 | C |
| | | | | C = 0.002 | C = 0.000 | | | |
| 5030354 | 29166 | 10248766 | A/C | A = 0.999 | A = 1.000 | 0.989 | 1.15 | C |
| | | | | C = 0.001 | C = 0.000 | | | |
| 5030355 | 29331 | 10248931 | A/C | A = 0.999 | A = 0.999 | 0.985 | 1.12 | C |
| | | | | C = 0.001 | C = 0.001 | | | |
| 281428 | 29724 | 10249324 | C/T | C = 0.821 | C = 0.823 | 0.951 | 1.01 | T |
| | | | | T = 0.179 | T = 0.177 | | | |
| 5030358 | 29773 | 10249373 | G/A | G = 0.006 | G = 0.007 | 0.966 | 1.12 | A |
| | | | | A = 0.994 | A = 0.993 | | | |
| 5030359 | 29862 | 10249462 | A/G | A = 0.001 | A = 0.003 | 0.858 | 4.75 | G |
| | | | | G = 0.999 | G = 0.997 | | | |
| 5030392 | 29877 | 10249477 | T/C | T = 0.002 | T = 0.001 | 0.958 | 0.59 | T |
| | | | | C = 0.998 | C = 0.999 | | | |
| 5030393 | 30194 | 10249794 | T/G | T = 0 | T = 0.005 | 0.836 | | G |
| | | | | G = 1.000 | G = 0.995 | | | |
| 5030360 | 30258 | 10249858 | T/G | T = 0 | T = 0.001 | 0.972 | | G |
| | | | | G = 1.000 | G = 0.999 | | | |
| 5030394 | 30549 | 10250149 | A/G | A = 0.005 | A = 0.006 | 0.926 | 1.23 | G |
| | | | | G = 0.995 | G = 0.994 | | | |
| 281429 | 30648 | 10250248 | T/C | T = 0.999 | T = 1.000 | 0.938 | 2.63 | C |
| | | | | C = 0.001 | C = 0.000 | | | |
| 5030361 | 30909 | 10250509 | T/C | T = 0.002 | T = 0.002 | 0.989 | 1.10 | C |
| | | | | C = 0.998 | C = 0.998 | | | |
| 5030362 | 30962 | 10250562 | A/C | A = 0.004 | A = 0.002 | 0.791 | 0.29 | A |
| | | | | C = 0.996 | C = 0.998 | | | |
| 281430 | 31337 | 10250937 | G/A | G = 0.015 | G = 0.008 | 0.498 | 0.51 | G |
| | | | | A = 0.985 | A = 0.992 | | | |
| 281431 | 31345 | 10250945 | T/C | T = | T = 0.886 | | | T |
| | | | | C = | C = 0.114 | | | |
| 5030395 | 31534 | 10251134 | C/T | C = 0.998 | C = 0.998 | 0.973 | 1.11 | T |
| | | | | T = 0.002 | T = 0.002 | | | |
| 5827095 | 31942 | 10251542 | A/— | A = 0.532 | A = 0.532 | 0.986 | 1.00 | A |
| | | | | — = 0.468 | — = 0.468 | | | |
| 281432 | 32058 | 10251658 | G/C | G = 0.51 | G = 0.553 | 0.194 | 1.19 | C |
| | | | | C = 0.490 | C = 0.447 | | | |
| 5030364 | 32109 | 10251709 | A/T | A = 0.001 | A = 0.002 | 0.902 | 4.40 | T |
| | | | | T = 0.999 | T = 0.998 | | | |
| 5030365 | 32401 | 10252001 | A/G | A = 1.000 | A = 1.000 | 1 | 1.03 | |
| | | | | G = 0.000 | G = 0.000 | | | |
| 5030368 | 32845 | 10252445 | G/A | G = 0.099 | G = 0.097 | 0.901 | 0.97 | G |
| | | | | A = 0.901 | A = 0.903 | | | |
| 5030369 | 32864 | 10252464 | T/C | T = 0.506 | T = 0.487 | 0.541 | 0.92 | T |
| | | | | C = 0.494 | C = 0.513 | | | |
| 3073809 | 32965- | 10252565\hat{ } | TT/— | T = 0.848 | T = 0.859 | 0.69 | 1.10 | — |
| | 32966 | 10252566 | | — = 0.152 | — = 0.141 | | | |
| 2358581 | 33011 | 10252611 | G/T | G = 0.904 | G = 0.919 | 0.525 | 1.20 | T |
| | | | | T = 0.096 | T = 0.081 | | | |
| 7258215 | 33170 | 10252770 | C/T | C = 0.85 | C = 0.847 | 0.88 | 0.97 | C |
| | | | | T = 0.150 | T = 0.153 | | | |
| 5030371 | 33516 | 10253116 | A/G | A = 0.001 | A = 0.001 | 0.969 | 0.58 | A |
| | | | | G = 0.999 | G = 0.999 | | | |
| 5030372 | 33608 | 10253208 | T/C | T = 1.000 | T = 1.000 | 0.997 | 1.08 | C |
| | | | | C = 0.000 | C = 0.000 | | | |
| 281433 | 33623 | 10253223 | A/C | A = 1.000 | A = 1.000 | 0.989 | 1.34 | C |
| | | | | C = 0.000 | C = 0.000 | | | |
| 5030374 | 33672 | 10253272 | C/A | C = 0.156 | C = | | | A |
| | | | | A = 0.844 | A = | | | |
| 5030375 | 33724 | 10253324 | A/— | A = 0.999 | A = 1.000 | 0.94 | 2.17 | — |
| | | | | — = 0.001 | — = 0.000 | | | |
| 5030397 | 33787 | 10253387 | T/G | T = 0.231 | T = 0.18 | 0.0697 | 0.73 | T |
| | | | | G = 0.769 | G = 0.820 | | | |
| 281434 | 34020 | 10253620 | G/A | G = 0.932 | G = 0.93 | 0.902 | 0.97 | G |
| | | | | A = 0.068 | A = 0.070 | | | |
| 12462944 | 34038 | 10253638 | C/G | C = 0.004 | C = 0.006 | 0.888 | 1.32 | G |
| | | | | G = 0.996 | G = 0.994 | | | |
| 5030398 | 34190 | 10253790 | C/G | C = 0.959 | C = 0.993 | 0.064 | 5.64 | G |
| | | | | G = 0.041 | G = 0.007 | | | |
| 5030378 | 34706 | 10254306 | C/G | C = 0.993 | C = 0.995 | 0.918 | 1.25 | G |
| | | | | G = 0.007 | G = 0.005 | | | |
| 12459133 | 34778 | 10254378 | T/G | T = 0.376 | T = 0.347 | 0.365 | 0.88 | T |
| | | | | G = 0.624 | G = 0.653 | | | |
| 5030399 | 35553 | 10255153 | A/G | A = 0.002 | A = 0.001 | 0.922 | 0.23 | A |
| | | | | G = 0.998 | G = 0.999 | | | |
| 5492 | 35690 | 10255290 | G/C | G = 1.000 | G = 1.000 | 0.993 | 0.00 | G |
| | | | | C = 0 | C = 0.000 | | | |
| 1800019 | 36173 | 10255773 | A/C | A = 0.002 | A = 0.001 | 0.914 | 0.47 | A |
| | | | | C = 0.998 | C = 0.999 | | | |
| 1799969 | 36192 | 10255792 | G/A | G = 0.882 | G = 0.849 | 0.134 | 0.75 | G |
| | | | | A = 0.118 | A = 0.151 | | | |
| 5493 | 36194 | 10255794 | T/G | T = 0.001 | T = 0 | 0.99 | 0.00 | T |
| | | | | G = 0.999 | G = 1.000 | | | |
| 5030381 | 36308 | 10255908 | C/T | C = 0.877 | C = | | | |
| | | | | T = 0.123 | T = | | | |
| 5494 | 36317 | 10255917 | C/T | C = 0.999 | C = 1.000 | 0.873 | 5.90 | T |
| | | | | T = 0.001 | T = 0.000 | | | |
| 3093033 | 36431 | 10256031 | G/A | G = 0.991 | G = 0.969 | 0.113 | 0.30 | G |
| | | | | A = 0.009 | A = 0.031 | | | |
| 5495 | 36496 | 10256096 | G/A | G = 1.000 | G = 0.999 | 0.888 | 0.19 | G |
| | | | | A = 0.000 | A = 0.001 | | | |
| 1801714 | 36608 | 10256208 | C/T | C = 0.995 | C = 0.98 | 0.129 | 0.25 | C |
| | | | | T = 0.005 | T = 0.020 | | | |
| 2071441 | 36708 | 10256308 | C/T | C = 1.000 | C = 1.000 | 0.993 | 1.25 | T |
| | | | | T = 0.000 | T = 0.000 | | | |
| 5496 | 36847 | 10256447 | A/G | A = 0.003 | A = 0.009 | 0.469 | 4.06 | G |
| | | | | G = 0.997 | G = 0.991 | | | |
| 5497 | 36868 | 10256468 | A/G | A = 0.004 | A = 0.006 | 0.813 | 1.61 | G |
| | | | | G = 0.996 | G = 0.994 | | | |
| 5030382 | 37083 | 10256683 | G/A | G = 0.449 | G = 0.512 | 0.0484 | 1.29 | A |
| | | | | A = 0.551 | A = 0.488 | | | |
| 5030400 | 37196 | 10256796 | C/T | C = 1.000 | C = 0.999 | 0.969 | 0.76 | C |
| | | | | T = 0.000 | T = 0.001 | | | |
| 2071440 | 37373 | 10256973 | G/A | G = 0.999 | G = 1.000 | 0.875 | 5.74 | A |
| | | | | A = 0.001 | A = 0.000 | | | |
| 5499 | 37465 | 10257065 | C/T | C = 0.994 | C = 1.000 | 0.47 | 8.13 | T |
| | | | | T = 0.006 | T = 0.000 | | | |
| 3093032 | 37736 | 10257336 | T/C | T = 0.322 | T = 0.267 | 0.0662 | 0.77 | T |
| | | | | C = 0.678 | C = 0.733 | | | |
| 1057981 | 37959 | 10257559 | G/A | G = 0.032 | G = 0.026 | 0.693 | 0.80 | G |
| | | | | A = 0.968 | A = 0.974 | | | |
| 5500 | 38031 | 10257631 | A/G | A = 0.995 | A = 0.996 | 0.868 | 1.35 | G |
| | | | | G = 0.005 | G = 0.004 | | | |
| 5501 | 38091 | 10257691 | T/C | T = 1.000 | T = 0.999 | 0.862 | 0.06 | T |
| | | | | C = 0.000 | C = 0.001 | | | |
| 5030383 | 38243 | 10257843 | T/C | T = 0.002 | T = 0.001 | 0.964 | 0.58 | T |
| | | | | C = 0.998 | C = 0.999 | | | |
| 281436 | 38531 | 10258131 | A/G | A = 0.501 | A = 0.452 | 0.132 | 0.82 | A |
| | | | | G = 0.499 | G = 0.548 | | | |
| 923366 | 38623 | 10258223 | T/C | T = 0.517 | T = 0.562 | 0.161 | 1.20 | C |
| | | | | C = 0.483 | C = 0.438 | | | |
| 281437 | 38638 | 10258238 | C/T | C = 0.804 | C = 0.852 | 0.0793 | 1.39 | T |
| | | | | T = 0.196 | T = 0.148 | | | |
| 3093030 | 38803 | 10258403 | T/C | T = 0.553 | T = 0.606 | 0.137 | 1.24 | C |
| | | | | C = 0.447 | C = 0.394 | | | |
| 5030384 | 39489 | 10259089 | A/G | A = 0.001 | A = 0.001 | 0.988 | 0.80 | A |
| | | | | G = 0.999 | G = 0.999 | | | |
| 5030385 | 40008 | 10259608 | G/C | G = 0.002 | G = 0.002 | 0.974 | 0.79 | G |
| | | | | C = 0.998 | C = 0.998 | | | |
| 3810159 | 40711 | 10260311 | T/C | T = 0.001 | T = 0.001 | 0.915 | 68.31 | C |
| | | | | C = 0.999 | C = 0.999 | | | |
| 281438 | 40775 | 10260375 | T/G | T = 0.767 | T = 0.802 | 0.31 | 1.23 | G |
| | | | | G = 0.233 | G = 0.198 | | | |
| 3093029 | 40951 | 10260551 | C/G | C = 0.912 | C = 0.92 | 0.683 | 1.11 | G |
| | | | | G = 0.088 | G = 0.080 | | | |
| 2735442 | 41218 | 10260818 | G/C | G = 0.999 | G = 0.999 | 0.97 | 0.79 | G |
| | | | | C = 0.001 | C = 0.001 | | | |
| 2569693 | 41304 | 10260904 | C/T | C = 0.703 | C = 0.641 | 0.0479 | 0.75 | C |
| | | | | T = 0.297 | T = 0.359 | | | |
| 281439 | 41510 | 10261110 | G/C | G = 0.471 | G = 0.418 | 0.111 | 0.81 | G |
| | | | | C = 0.529 | C = 0.582 | | | |
| 281440 | 41704 | 10261304 | G/A | G = 0.268 | G = 0.255 | 0.676 | 0.94 | G |
| | | | | A = 0.732 | A = 0.745 | | | |
| 2569694 | 42020 | 10261620 | C/T | C = 0.999 | C = 0.999 | 0.972 | 1.20 | T |
| | | | | T = 0.001 | T = 0.001 | | | |
| 11575073 | 42210 | 10261810 | C/T | C = 0.924 | C = | | | T |
| | | | | T = 0.076 | T = | | | |
| 2569695 | 42302 | 10261902 | C/G | C = 1.000 | C = 0.998 | 0.815 | 0.02 | C |
| | | | | G = 0.000 | G = 0.002 | | | |
| 2075741 | 42498 | 10262098 | G/C | G = 0.715 | G = 0.631 | 0.0112 | 0.68 | G |
| | | | | C = 0.285 | C = 0.369 | | | |
| 11575074 | 42520 | 10262120 | A/G | A = 0.088 | A = 0.097 | 0.702 | 1.11 | G |
| | | | | G = 0.912 | G = 0.903 | | | |
| 2569696 | 42607 | 10262207 | A/G | A = 0.005 | A = 0.004 | 0.909 | 0.69 | A |
| | | | | G = 0.995 | G = 0.996 | | | |
| 2735439 | 42674 | 10262274 | T/G | T = 1.000 | T = 1.000 | 0.928 | | G |
| | | | | G = 0.000 | G = 0 | | | |
| 2569697 | 42929 | 10262529 | G/C | G = 1.000 | G = 1.000 | 0.97 | 3.84 | C |
| | | | | C = 0.000 | C = 0.000 | | | |
| 2075742 | 43007 | 10262607 | G/C | G = | G = 0.638 | | | G |
| | | | | C = | C = 0.362 | | | |
| 2569698 | 43040 | 10262640 | C/G | C = 1.000 | C = 1.000 | 0.98 | | G |
| | | | | G = 0.000 | G = 0 | | | |
| 11669397 | 43246 | 10262846 | C/T | C = 1.000 | C = 1.000 | 0.962 | 0.00 | C |
| | | | | T = 0 | T = 0.000 | | | |
| 901886 | 43531 | 10263131 | T/C | T = 0.667 | T = 0.645 | 0.544 | 0.90 | T |
| | | | | C = 0.333 | C = 0.355 | | | |
| 885742 | 44023 | 10263623 | G/A | G = 0.012 | G = 0.016 | 0.633 | 1.46 | A |
| | | | | A = 0.988 | A = 0.984 | | | |
| 2569699 | 44024 | 10263624 | T/G | T = 0.999 | T = 1.000 | 0.962 | 1.82 | G |
| | | | | G = 0.001 | G = 0.000 | | | |
| 11549918 | 44338 | 10263938 | C/T | C = 0.635 | C = 0.562 | 0.0293 | 0.74 | C |
| | | | | T = 0.365 | T = 0.438 | | | |
| 2569700 | 44499 | 10264099 | T/G | T = 0.006 | T = 0.011 | 0.703 | 1.80 | G |
| | | | | G = 0.994 | G = 0.989 | | | |
| 2228615 | 44768 | 10264368 | A/G | A = 0.402 | A = 0.484 | 0.0318 | 1.40 | G |
| | | | | G = 0.598 | G = 0.516 | | | |
| ICAM-AA | 45003 | 10264603 | C/T | C = 0.934 | C = 0.958 | 0.309 | 1.59 | T |
| | | | | T = 0.066 | T = 0.042 | | | |
| 2569701 | 45341 | 10264941 | G/A | G = 1.000 | G = 1.000 | 0.917 | 10.14 | A |
| | | | | A = 0.000 | A = 0.000 | | | |
| 2569702 | 45347 | 10264947 | T/C | T = 0.709 | T = 0.646 | 0.0681 | 0.75 | T |
| | | | | C = 0.291 | C = 0.354 | | | |
| 2735440 | 45577 | 10265177 | G/A | G = 0.01 | G = 0.006 | 0.624 | 0.52 | G |
| | | | | A = 0.990 | A = 0.994 | | | |
| 2569703 | 45627 | 10265227 | C/G | C = 0.563 | C = 0.527 | 0.274 | 0.86 | C |
| | | | | G = 0.437 | G = 0.473 | | | |
| 10418913 | 45794 | 10265394 | A/G | A = 0.001 | A = 0.002 | 0.923 | 2.09 | G |
| | | | | G = 0.999 | G = 0.998 | | | |
| 1056536 | 46244 | 10265844 | C/T | C = 1.000 | C = 1.000 | 0.989 | 2.49 | T |
| | | | | T = 0.000 | T = 0.000 | | | |
| 2569704 | 46469 | 10266069 | T/C | T = 0.003 | T = 0.001 | 0.905 | 0.24 | T |
| | | | | C = 0.997 | C = 0.999 | | | |
| 11673661 | 46999 | 10266599 | G/C | G = 0.997 | G = 0.999 | 0.874 | 2.39 | C |
| | | | | C = 0.003 | C = 0.001 | | | |
| 10402760 | 47265 | 10266865 | T/C | T = 0.168 | T = 0.104 | 0.0276 | 0.58 | T |
| | | | | C = 0.832 | C = 0.896 | | | |
| ICAM-AB | 47504 | 10267104 | A/G | A = 0.264 | A = | | | |
| | | | | G = 0.736 | G = | | | |
| 2569706 | 47547 | 10267147 | G/A | G = 0.997 | G = 1.000 | 0.666 | 45.64 | A |
| | | | | A = 0.003 | A = 0.000 | | | |
| 2569707 | 47637 | 10267237 | C/G | C = 0.173 | C = 0.171 | 0.942 | 0.99 | C |
| | | | | G = 0.827 | G = 0.829 | | | |
| 2436545 | 47691 | 10267291 | C/A | C = 0.001 | C = 0.001 | 0.991 | 0.86 | C |
| | | | | A = 0.999 | A = 0.999 | | | |
| 2436546 | 47692 | 10267292 | A/C | A = 1.000 | A = 0.998 | 0.866 | 0.26 | A |
| | | | | C = 0.000 | C = 0.002 | | | |
| 2916060 | 47788 | 10267388 | A/C | A = 0.99 | A = 0.993 | 0.803 | 1.39 | C |
| | | | | C = 0.010 | C = 0.007 | | | |
| 2916059 | 47796 | 10267396 | T/C | T = 0.999 | T = 0.999 | 0.968 | 0.73 | T |
| | | | | C = 0.001 | C = 0.001 | | | |
| 2916058 | 47800 | 10267400 | T/A | T = 1.000 | T = 0.999 | 0.869 | 0.30 | T |
| | | | | A = 0.000 | A = 0.001 | | | |
| 2569708 | 47812 | 10267412 | A/G | A = 0.004 | A = 0.003 | 0.936 | 0.73 | A |
| | | | | G = 0.996 | G = 0.997 | | | |
| 735747 | 47969 | 10267569 | T/C | T = 0.999 | T = 1.000 | 0.91 | 2.15 | C |
| | | | | C = 0.001 | C = 0.000 | | | |
| 885743 | 48035 | 10267635 | A/T | A = 0.661 | A = 0.676 | 0.698 | 1.07 | T |
| | | | | T = 0.339 | T = 0.324 | | | |
| 710845 | 48569 | 10268169 | C/G | C = 0.744 | C = 0.665 | 0.0156 | 0.68 | C |
| | | | | G = 0.256 | G = 0.335 | | | |
| 2569709 | 48823 | 10268423 | C/G | C = 0.999 | C = 1.000 | 0.967 | 1.45 | G |
| | | | | G = 0.001 | G = 0.000 | | | |
| 2569710 | 48838 | 10268438 | A/G | A = 0.999 | A = 0.998 | 0.943 | 0.71 | A |
| | | | | G = 0.001 | G = 0.002 | | | |
| 2569711 | 48894 | 10268494 | C/G | C = 1.000 | C = 1.000 | 0.98 | 0.60 | C |
| | | | | G = 0.000 | G = 0.000 | | | |
| 2569712 | 48934 | 10268534 | A/T | A = 1.000 | A = 1.000 | 0.983 | 1.93 | T |
| | | | | T = 0.000 | T = 0.000 | | | |
| 12610026 | 49249 | 10268849 | A/G | A = 0.992 | A = | | | G |
| | | | | G = 0.008 | G = | | | |
| 4804129 | 49509 | 10269109 | C/A | C = 0.002 | C = 0.002 | 0.978 | 0.83 | C |
| | | | | A = 0.998 | A = 0.998 | | | |
| 12150978 | 49718 | 10269318 | A/G | A = 0.8 | A = 0.782 | 0.599 | 0.90 | A |
| | | | | G = 0.200 | G = 0.218 | | | |
| 439843 | 49963 | 10269563 | C/A | C = 1.000 | C = 0.999 | 0.981 | 0.82 | C |
| | | | | A = 0.000 | A = 0.001 | | | |
| 892188 | 51193 | 10270793 | T/C | T = 0.487 | T = 0.567 | 0.0122 | 1.38 | C |
| | | | | C = 0.513 | C = 0.433 | | | |
| 2291473 | 57181 | 10276781 | T/C | T = 0.913 | T = 0.909 | 0.83 | 0.95 | T |
| | | | | C = 0.087 | C = 0.091 | | | |
| 281416 | 60184 | 10279784 | A/G | A = 0.456 | A = 0.496 | 0.221 | 1.18 | G |
| | | | | G = 0.544 | G = 0.504 | | | |
| 281417 | 60530 | 10280130 | T/C | T = 0.532 | T = 0.526 | 0.86 | 0.98 | T |
| | | | | C = 0.468 | C = 0.474 | | | |
| 882589 | 61354 | 10280954 | T/C | T = 0 | T = 0.002 | 0.865 | | C |
| | | | | C = 1.000 | C = 0.998 | | | |
| 1048941 | 62616 | 10282216 | T/G | T = 0.304 | T = | | | |
| | | | | G = 0.696 | G = | | | |
| 281418 | 62785 | 10282385 | G/C | G = 0.088 | G = 0.0680 | 0.369 | 0.76 | G |
| | | | | C = 0.912 | C = 0.932 | | | |
| 430092 | 66351 | 10285951 | C/T | C = 0.764 | C = 0.744 | 0.588 | 0.90 | C |
| | | | | T = 0.236 | T = 0.256 | | | |
| 368835 | 67386 | 10286986 | A/G | A = 0.303 | A = 0.274 | 0.347 | 0.86 | A |
| | | | | G = 0.697 | G = 0.726 | | | |
| 2358583 | 67395 | 10286995 | T/G | T = 0.696 | T = 0.674 | 0.505 | 0.90 | T |
| | | | | G = 0.304 | G = 0.326 | | | |
| 378395 | 67822 | 10287422 | C/A | C = 0.323 | C = | | | A |
| | | | | A = 0.677 | A = | | | |
| 395782 | 68028 | 10287628 | T/C | T = 0.726 | T = 0.656 | 0.115 | 0.72 | T |
| | | | | C = 0.274 | C = 0.344 | | | |
| 1045384 | 68646 | 10288246 | T/G | T = 0.326 | T = 0.302 | 0.424 | 0.89 | T |
| | | | | G = 0.674 | G = 0.698 | | | |
| 281427 | 70520 | 10290120 | C/T | C = 0.785 | C = 0.823 | 0.226 | 1.27 | T |
| | | | | T = 0.215 | T = 0.177 | | | |
| 3745264 | 70966 | 10290566 | T/G | T = 0.156 | T = 0.164 | 0.76 | 1.06 | G |
| | | | | G = 0.844 | G = 0.836 | | | |
| 281426 | 72451 | 10292051 | G/A | G = 0.437 | G = 0.321 | 0.000196 | 0.61 | G |
| | | | | A = 0.563 | A = 0.679 | | | |
| 281425 | 73199 | 10292799 | G/T | G = 0.806 | G = | | | |
| | | | | T = 0.194 | T = | | | |
| 281424 | 74319 | 10293919 | C/T | C = 0.753 | C = 0.748 | 0.861 | 0.97 | C |
| | | | | T = 0.247 | T = 0.252 | | | |
| 281423 | 76893 | 10296493 | C/T | C = 0.804 | C = 0.804 | 0.993 | 1.00 | T |
| | | | | T = 0.196 | T = 0.196 | | | |
| 281422 | 77755 | 10297355 | T/C | T = 0.372 | T = 0.364 | 0.829 | 0.97 | T |
| | | | | C = 0.628 | C = 0.636 | | | |
| 281420 | 79354 | 10298954 | A/G | A = 0.608 | A = 0.567 | 0.213 | 0.85 | A |
| | | | | G = 0.392 | G = 0.433 | | | |
| 3745263 | 80901 | 10300501 | A/G | A = 0.064 | A = 0.08 | 0.513 | 1.27 | G |
| | | | | G = 0.936 | G = 0.920 | | | |
| 3745262 | 80940 | 10300540 | T/C | T = 0.996 | T = 0.999 | 0.731 | 4.38 | C |
| | | | | C = 0.004 | C = 0.001 | | | |
| 3745261 | 81111 | 10300711 | T/C | T = 0.987 | T = 0.983 | 0.752 | 0.76 | T |
| | | | | C = 0.013 | C = 0.017 | | | |
| 3181049 | 82517 | 10302117 | T/C | T = 0.353 | T = 0.363 | 0.761 | 1.04 | C |
| | | | | C = 0.647 | C = 0.637 | | | |
| 281412 | 82874 | 10302474 | T/C | T = 0.846 | T = 0.841 | 0.823 | 0.96 | T |
| | | | | C = 0.154 | C = 0.159 | | | |
| 3181048 | 84978 | 10304578 | A/G | A = 1.000 | A = 1.000 | 0.98 | 0.46 | A |
| | | | | G = 0.000 | G = 0.000 | | | |
| 2230399 | 86003 | 10305603 | C/G | C = 0.171 | C = 0.161 | 0.708 | 0.93 | C |
| | | | | G = 0.829 | G = 0.839 | | | |
| 2278442 | 86226 | 10305826 | G/A | G = 0.42 | G = 0.405 | 0.674 | 0.94 | G |
| | | | | A = 0.580 | A = 0.595 | | | |
| 3181047 | 87206 | 10306806 | A/G | A = 0.008 | A = 0.003 | 0.654 | 0.30 | A |
| | | | | G = 0.992 | G = 0.997 | | | |
| 3181046 | 87535 | 10307135 | T/C | T = 0.999 | T = 1.000 | 0.946 | 2.38 | C |
| | | | | C = 0.001 | C = 0.000 | | | |
| 2304237 | 87968 | 10307568 | T/C | T = 0.898 | T = 0.907 | 0.726 | 1.10 | C |
| | | | | C = 0.102 | C = 0.093 | | | |
| 281413 | 88134 | 10307734 | G/A | G = 0.697 | G = 0.702 | 0.877 | 1.03 | A |
| | | | | A = 0.303 | A = 0.298 | | | |
| 1058154 | 88297 | 10307897 | A/C | A = 0.22 | A = 0.186 | 0.31 | 0.81 | A |
| | | | | C = 0.780 | C = 0.814 | | | |
| 3176769 | 88434 | 10308034 | T/C | T = 0.801 | T = 0.786 | 0.593 | 0.91 | T |
| | | | | C = 0.199 | C = 0.214 | | | |
| 2304238 | 90602 | 10310202 | G/A | G = 0.002 | G = 0.001 | 0.954 | 0.62 | G |
| | | | | A = 0.998 | A = 0.999 | | | |
| 2304239 | 90750 | 10310350 | T/C | T = 0.001 | T = 0.003 | 0.876 | 2.50 | C |
| | | | | C = 0.999 | C = 0.997 | | | |
| 2304240 | 90792 | 10310392 | G/A | G = 0.828 | G = 0.797 | 0.261 | 0.82 | G |
| | | | | A = 0.172 | A = 0.203 | | | |
| 3176768 | 91065 | 10310665 | A/G | A = 0.355 | A = 0.35 | 0.871 | 0.98 | A |
| | | | | G = 0.645 | G = 0.650 | | | |
| 3176767 | 91151 | 10310751 | C/A | C = 0.278 | C = 0.277 | 0.951 | 0.99 | C |
| | | | | A = 0.722 | A = 0.723 | | | |
| 3176766 | 91178 | 10310778 | C/T | C = 0.768 | C = 0.765 | 0.937 | 0.99 | C |
| | | | | T = 0.232 | T = 0.235 | | | |
| 281414 | 91685 | 10311285 | G/A | G = 0.697 | G = 0.72 | 0.47 | 1.12 | A |
| | | | | A = 0.303 | A = 0.280 | | | |
| 281415 | 92393 | 10311993 | T/G | T = 0.341 | T = 0.312 | 0.343 | 0.88 | T |
| | | | | G = 0.659 | G = 0.688 | | | |

[0288] FIG. 1A shows proximal SNPs in and around the ICAM region for females. The position of each SNP on the chromosome is presented on the x-axis. The y-axis gives the negative logarithm (base 10) of the p-value comparing the estimated allele in the case group to that of the control group. The minor allele frequency of the control group for each SNP designated by an X or other symbol on the graphs FIG. 1A can be determined by consulting Table 12. By proceeding down the Table from top to bottom and across the graphs from left to right the allele frequency associated with each symbol shown can be determined.

[0289] To aid the interpretation, multiple lines have been added to the graph. The broken horizontal lines are drawn at two common significance levels, 0.05 and 0.01. The vertical broken lines are drawn every 20 kb to assist in the interpretation of distances between SNPs. Two other lines are drawn to expose linear trends in the association of SNPs to the disease. The light gray line (or generally bottom-most curve) is a nonlinear smoother through the data points on the graph using a local polynomial regression method (W. S. Cleveland, E. Grosse and W. M. Shyu (1992) Local regression models. Chapter 8 of Statistical Models in S eds J. M. Chambers and T. J. Hastie, Wadsworth & Brooks/Cole.). The black line provides a local test for excess statistical significance to identify regions of association. This was created by use of a 10 kb sliding window with 1 kb step sizes. Within each window, a chi-square goodness of fit test was applied to compare the proportion of SNPs that were significant at a test wise level of 0.01, to the proportion that would be expected by chance alone (0.05 for the methods used here). Resulting p-values that were less than 10⁻⁸ were truncated at that value.

[0290] Finally, the gene or genes present in the loci region of the proximal SNPs as annotated by Locus Link (http address: www.ncbi.nlm.nih.gov/LocusLink/) are provided on the graph. The exons and introns of the genes in the covered region are plotted below each graph at the appropriate chromosomal positions. The gene boundary is indicated by the broken horizontal line. The exon positions are shown as thick, unbroken bars. An arrow is place at the 3′ end of each gene to show the direction of transcription.

[0291] Additional Genotyping

[0292] In addition to the ICAM region incident SNP, fourteen other SNPs were genotyped in the discovery cohort. The discovery cohort is described in Example 1. The SNP rs2228615 is located in the ICAM5 encoding portion of the sequence, and is associated with breast cancer with a p-value of 0. .00236, and encoded non-synonymous amino acids (see Table 15).

[0293] The methods used to verify and genotype the two proximal SNPs of Table 15 are the same methods described in Examples 1 and 2 herein. The PCR primers and extend primers used in these assays are provided in Table 13 and Table 14, respectively.

TABLE 13

| | | |
|---|---|---|
| dbSNP rs# | Forward PCR primer | Reverse PCR primer |

| | | |
|---|---|---|
| 1801714 | ACGTTGGATGAGGGTTGCAGAGCAGGAGAA | ACGTTGGATGAGCCAAGGTGACGCTGAATG |
| 2228615 | ACGTTGGATGAGATGGTGACAGTAACCTGC | ACGTTGGATGTGGCATTTAGCTGAAGCTGG |
| 2569703 | ACGTTGGATGATAACCCTTGGACGCCGATC | ACGTTGGATGTTAGACGAAAAAGGCGCCAC |
| 1799969 | ACGTTGGATGAACCTCTGGTCCCCCAGTGC | ACGTTGGATGTCCTAGAGGTGGACACGCAG |
| 1059849 | ACGTTGGATGAAGCTGAGGCCACAGGGAG | ACGTTGGATGAGAGGGAATGGATGCAGAAG |
| 3093035 | ACGTTGGATGTAGAAAGCAGTGCGATCTGG | ACGTTGGATGGGAGACATAGCGAGATTCTG |
| 281439 | ACGTTGGATGGCTCGCTGGCACTTTCGTC | ACGTTGGATGGAGCCATACCTCTAAGCACC |
| 281432 | ACGTTGGATGAGCTGGGACTTTCCTTCTTG | ACGTTGGATGGCCTTCAGCTATCTAATCCC |
| 901886 | ACGTTGGATGTACGCGATCTGGTCGCTCTG | ACGTTGGATGTTCAGGCCCCACCTTCTGTT |
| 5030382 | ACGTTGGATGACTCACAGAGCACATTCACG | ACGTTGGATGAGATCTTGAGGGCACCTACC |
| 2569693 | ACGTTGGATGGTGTCTACTCAGCGTGTGTG | ACGTTGGATGCTTGTTCTCGCGTGGATGTC |
| 2569702 | ACGTTGGATGACCCTCCAGACCTTGAACCA | ACGTTGGATGGTCAAGGACGTAACGCTAAC |
| 3093030 | ACGTTGGATGACTTCCTCCCCCAAGAAAAC | ACGTTGGATGAGAGACCCAGAAGGTCATAG |
| 2075741 | ACGTTGGATGAGACCCAGTGTCTCTCCTGT | ACGTTGGATGAAGATGCCAGTCCGTGGACC |
| 11549918 | ACGTTGGATGTAGATGGTCACGTTCTCCCG | ACGTTGGATGACAGCTAGCGCAGAGCAGGA |

[0294] TABLE 14

| | | |
|---|---|---|
| dbSNP rs# | Extend Primer | Term Mix |

| | | |
|---|---|---|
| 1801714 | CCTTCAGCAGGAGCTGGGCCCTC | ACT |
| 2228615 | TAACCTGCGCAGCTGGG | ACT |
| 2569703 | GAGGTGTCACGCTAGTCGAG | ACT |
| 1799969 | CTCCGAGACTGGGAACAGCC | ACG |
| 1059849 | AGGGGCGACTCCACGGA | ACT |
| 3093035 | CTGAGTCCGGATCAGAA | ACG |
| 281439 | GTCCCGCCCCCTCCGTCGCGTGC | ACT |
| 281432 | GGAGTCATGGAGGGTTT | ACT |
| 901886 | TCCGCAGCTCTTTGAAC | ACT |
| 5030382 | CACATTCACGGTCACCT | ACG |
| 2569693 | CCTTCTGCTCGGTGGGTGG | ACT |
| 2569702 | ACCTTGAACCAGATAGAA | ACT |
| 3093030 | AAACATTGTGGGTTGATGG | ACG |
| 2075741 | CCCGGGTACCTCCTTACGCT | ACT |
| 11549918 | CCCCAGGGTGACGTTGCAGA | ACG |

[0295] Table 15, below, shows the case and control allele frequencies along with the p-values for the SNPs genotyped. The disease associated allele of column 4 is in bold and the disease associated amino acid of column 5 is also in bold. The chromosome positions provided correspond to NCBI's Build 34.

TABLE 15
Genotyping Results

| | | | | | | | | | Breast |
|---|---|---|---|---|---|---|---|---|---|
| | Position in | | | Amino | | | | | Cancer |
| | SEQ ID | Chromosome | Alleles | Acid | | AF F | | Odds | Associated |
| dbSNP rs# | NO: 1 | Position | (A1/A2) | Change | AF F case | control | p-value | Ratio | Allele |
| 1801714 | 36608 | 10240417 | T/C | L352P | T = 0.010 | T = 0.030 | 0.0734 | 2.26 | C |
| | | | | | C = 0.990 | C = 0.097 | | | |
| 2228615 | 44768 | 10248577 | A/G | T348A | A = 0.340 | A = 0.430 | 0.00236 | 1.47 | G |
| | | | | | G = 0.660 | G = 0.570 | | | |
| 2569703 | 45627 | 10265227 | G/C | | G = 0.508 | G = 0.581 | 0.019 | 1.34 | C |
| | | | | | C = 0.492 | C = 0.419 | | | |
| 1799969 | 36192 | 10255792 | G/A | G241R | G = 0.912 | G = 0.883 | 0.12 | 0.723 | G |
| | | | | | A = 0.088 | A = 0.117 | | | |
| 1059849 | 12054 | 10231654 | A/G | | A = 0.443 | A = 0.364 | 0.00996 | 0.719 | A |
| | | | | | G = 0.557 | G = 0.636 | | | |
| 3093035 | 24373 | 10243973 | G/A | | G = 0.941 | G = 0.951 | 0.466 | 1.22 | A |
| | | | | | A = 0.059 | A = 0.049 | | | |
| 281439 | 41510 | 10261110 | C/G | | C = 0.765 | C = 0.781 | 0.563 | 1.09 | G |
| | | | | | G = 0.235 | G = 0.219 | | | |
| 281432 | 32058 | 10251658 | C/G | | C = 0.549 | C = 0.554 | 0.876 | 1.02 | G |
| | | | | | G = 0.451 | G = 0.446 | | | |
| 901886 | 43531 | 10263131 | T/C | | T = 0.557 | T = 0.483 | 0.0177 | 0.741 | T |
| | | | | | C = 0.443 | C = 0.517 | | | |
| 5030382 | 37083 | 10256683 | G/A | | G = 0.616 | G = 0.536 | 0.0102 | 0.721 | G |
| | | | | | A = 0.384 | A = 0.464 | | | |
| 2569693 | 41304 | 10260904 | T/C | | T = 0.35 | T = 0.451 | 0.0012 | 1.53 | C |
| | | | | | C = 0.65 | C = 0.549 | | | |
| 2569702 | 45347 | 10264947 | T/C | | T = 0.667 | T = 0.562 | 0.000829 | 0.643 | T |
| | | | | | C = 0.333 | C = 0.438 | | | |
| 3093030 | 38803 | 10258403 | C/T | | C = 0.613 | C = 0.541 | 0.0235 | 0.745 | C |
| | | | | | T = 0.387 | T = 0.459 | | | |
| 2075741 | 42498 | 10262098 | C/G | | C = 0.392 | C = 0.466 | 0.0168 | 1.35 | G |
| | | | | | G = 0.608 | G = 0.534 | | | |
| 11549918 | 44338 | 10263938 | G/A | | G = 0.663 | G = 0.558 | 0.000613 | 0.642 | G |
| | | | | | A = 0.337 | A = 0.442 | | | |

### Example 5

### MAPK10 Proximal SNPs

[0296] It has been discovered that a polymorphic variation (rs1541998) in a region that encodes MAPK10 is associated with the occurrence of breast cancer (see Examples 1 and 2). Subsequently, SNPs proximal to the incident SNP (rs1541998) were identified and allelotyped in breast cancer sample sets and control sample sets as described in Examples 1 and 2. Approximately ninety-two allelic variants located within the MAPK10 region were identified and allelotyped. The polymorphic variants are set forth in Table 16. The chromosome position provided in column four of Table 16 is based on Genome “Build 34” of NCBI's GenBank.

TABLE 16

| | Position in | | | | | |
|---|---|---|---|---|---|---|
| | SEQ ID | | Chromosome | Allele | Genome | Deduced |
| dbSNP rs# | NO: 2 | Chromosome | Position | Variants | Letter | Iupac |
| 2575681 | 206 | 4 | 87372306 | c/t | g | R |
| 2575680 | 1505 | 4 | 87373605 | a/g | t | Y |
| 2589505 | 3796 | 4 | 87375896 | c/t | a | R |
| 2589504 | 3950 | 4 | 87376050 | g/a | t | Y |
| 2164538 | 4527 | 4 | 87376627 | t/c | a | R |
| 2575679 | 7588 | 4 | 87379688 | a/g | t | Y |
| 10305 | 8482 | 4 | 87380582 | a/t | a | W |
| 2869408 | 9016 | 4 | 87381116 | c/g | g | S |
| 2904086 | 9018 | 4 | 87381118 | c/t | t | Y |
| 934648 | 9747 | 4 | 87381847 | t/c | g | R |
| 2589511 | 12207 | 4 | 87384307 | g/a | g | R |
| 2060589 | 13040 | 4 | 87385140 | g/a | t | Y |
| 2164537 | 13492 | 4 | 87385592 | t/c | g | R |
| 2575678 | 13802 | 4 | 87385902 | a/c | t | K |
| 2575677 | 13918 | 4 | 87386018 | g/c | g | S |
| 2589510 | 14153 | 4 | 87386253 | a/g | c | Y |
| 2589509 | 14370 | 4 | 87386470 | t/g | c | M |
| 2164536 | 15068 | 4 | 87387168 | a/c | t | K |
| 2164535 | 15474 | 4 | 87387574 | t/a | a | W |
| 1946734 | 17117 | 4 | 87389217 | c/g | c | S |
| 2589525 | 17777 | 4 | 87389877 | g/a | g | R |
| 2589523 | 19497 | 4 | 87391597 | c/t | a | R |
| 3755970 | 19646 | 4 | 87391746 | a/c | a | M |
| MAPK10-AA | 21751 | 4 | 87393851 | a/c | g | K |
| 2575675 | 22185 | 4 | 87394285 | g/a | t | Y |
| 1202 | 22703 | 4 | 87394803 | t/c | c | Y |
| 1201 | 22763 | 4 | 87394863 | a/g | a | R |
| 2589516 | 23391 | 4 | 87395491 | g/t | a | M |
| 2575674 | 23841 | 4 | 87395941 | a/t | a | W |
| 2589515 | 23883 | 4 | 87395983 | g/c | g | S |
| 3733367 | 24132 | 4 | 87396232 | c/t | c | Y |
| 958 | 24169 | 4 | 87396269 | c/t | c | Y |
| 2589506 | 25987 | 4 | 87398087 | g/a | t | Y |
| 1436524 | 26072 | 4 | 87398172 | a/g | c | Y |
| 2575672 | 26376 | 4 | 87398476 | c/t | g | R |
| 2589518 | 26614 | 4 | 87398714 | g/a | c | Y |
| 3775164 | 26727 | 4 | 87398827 | t/g | t | K |
| 2589514 | 26827 | 4 | 87398927 | g/a | c | Y |
| 3775166 | 27084 | 4 | 87399184 | t/c | t | Y |
| MAPK10-AB | 30965 | 4 | 87403065 | g/a | c | Y |
| 3775167 | 32436 | 4 | 87404536 | c/t | c | Y |
| 3822035 | 32821 | 4 | 87404921 | t/a | t | W |
| 3775168 | 32979 | 4 | 87405079 | a/t | t | W |
| 3775169 | 33572 | 4 | 87405672 | t/c | t | Y |
| 2043650 | 35142 | 4 | 87407242 | a/g | c | Y |
| 2043649 | 35237 | 4 | 87407337 | t/g | c | M |
| 3775170 | 36014 | 4 | 87408114 | t/a | t | W |
| 1541998 | 36439 | 4 | 87408539 | c/t | a | R |
| MAPK10-AC | 36838 | 4 | 87408938 | g/a | a | R |
| MAPK10-AD | 36889 | 4 | 87408989 | g/a | g | R |
| MAPK10-AE | 38639 | 4 | 87410739 | t/c | t | Y |
| 2282599 | 38657 | 4 | 87410757 | t/g | a | M |
| MAPK10-AF | 38865 | 4 | 87410965 | t/c | t | Y |
| MAPK10-AG | 38885 | 4 | 87410985 | a/g | g | R |
| MAPK10-AH | 38943 | 4 | 87411043 | t/c | t | Y |
| MAPK10-AI | 39035 | 4 | 87411135 | t/c | c | Y |
| MAPK10-AJ | 39046 | 4 | 87411146 | t/c | t | Y |
| 2282598 | 39218 | 4 | 87411318 | c/t | g | R |
| 2282597 | 39241 | 4 | 87411341 | g/a | t | Y |
| 3775171 | 40105 | 4 | 87412205 | a/c | a | M |
| 3775172 | 40240 | 4 | 87412340 | c/t | t | Y |
| 3775173 | 41162 | 4 | 87413262 | t/c | t | Y |
| 3775174 | 42477 | 4 | 87414577 | a/c | a | M |
| 1469870 | 46191 | 4 | 87418291 | g/c | c | S |
| 1436522 | 50467 | 4 | 87422567 | t/c | a | R |
| 1946733 | 52934 | 4 | 87425034 | g/a | c | Y |
| 983362 | 54730 | 4 | 87426830 | t/c | c | Y |
| 3755971 | 58283 | 4 | 87430383 | c/t | t | Y |
| 3822036 | 58378 | 4 | 87430478 | c/g | g | S |
| 3775175 | 59505 | 4 | 87431605 | g/a | a | R |
| 1436525 | 60229 | 4 | 87432329 | g/a | g | R |
| 3822037 | 61108 | 4 | 87433208 | c/g | c | S |
| 3775176 | 62587 | 4 | 87434687 | g/a | a | R |
| 993593 | 63133 | 4 | 87435233 | c/t | c | Y |
| 1436527 | 63616 | 4 | 87435716 | c/t | c | Y |
| 1436529 | 65377 | 4 | 87437477 | t/c | c | Y |
| 3775180 | 65442 | 4 | 87437542 | a/c | a | M |
| 3775181 | 65548 | 4 | 87437648 | t/g | g | K |
| 3775182 | 65878 | 4 | 87437978 | t/g | g | K |
| 3775183 | 66222 | 4 | 87438322 | g/a | a | R |
| 3775184 | 66354 | 4 | 87438454 | a/g | a | R |
| 733245 | 67224 | 4 | 87439324 | a/t | a | W |
| 3775185 | 68198 | 4 | 87440298 | t/g | g | K |
| 1561154 | 68729 | 4 | 87440829 | t/c | c | Y |
| 3775186 | 69058 | 4 | 87441158 | a/c | c | M |
| 3775187 | 69527 | 4 | 87441627 | t/c | t | Y |
| 1010778 | 70774 | 4 | 87442874 | a/g | t | Y |
| 2282596 | 71232 | 4 | 87443332 | t/a | t | W |
| 2282595 | 71943 | 4 | 87444043 | a/c | t | K |
| 2118044 | 73397 | 4 | 87445497 | a/t | a | W |
| 1469869 | 76322 | 4 | 87448422 | c/t | c | Y |
| MAPK10-AK | 110704 | 4 | 87482804 | a/g | t | Y |

Assay for Verifing and Allelotyping SNPs

[0297] The methods used to verify and allelotype the proximal SNPs of Table 16 are the same methods described in Examples 1 and 2 herein. The PCR primers and extend primers used in these assays are provided in Table 17 and Table 18, respectively.

TABLE 17

| | | |
|---|---|---|
| dbSNP rs# | Forward PCR primer | Reverse PCR primer |

| | | | |
|---|---|---|---|
| 2575681 | ACGTTGGATGTTATATAGCCTTCTTTTCTC | ACGTTGGATGTTCACTGCTAACATGCATGG | |
| 2575680 | ACGTTGGATGGAGCCCAATACAATCAGGTG | ACGTTGGATGGCCCTGAAGTTTTTGAATGG | |
| 2589505 | ACGTTGGATGCATTTTATGAGAAGATGCAC | ACGTTGGATGAGACTGTAGCCTAAATGAGG | |
| 2589504 | ACGTTGGATGCTGTGTGATTTGGACAACCC | ACGTTGGATGGGATAGGAAACATATTAAGG | |
| 2164538 | ACGTTGGATGAGAGGTCATCTTAATGGGCC | ACGTTGGATGTACTGCAGAGCTCTCCCTTG | |
| 2575679 | ACGTTGGATGTAAGCCAGTAACACATGCCG | ACGTTGGATGCTTTCCTGCTGCATTTAGTG | |
| 10305 | ACGTTGGATGGGTGAAGCTTGAAAGCAAGC | ACGTTGGATGTTCAAGAATTATTTTATTGC | |
| | | AAGTC | |
| 2869408 | ACGTTGGATGGCTTTGAATTACTCTGTCCC | ACGTTGGATGTCCCAGTACCTAAGTAGCAG | |
| 2904086 | ACGTTGGATGGCTTTGAATTACTCTGTCCC | ACGTTGGATGTCCCAGTACCTAAGTAGCAG | |
| 934648 | ACGTTGGATGTGTACTGCTTTCATCCTTGC | ACGTTGGATGACTGGTTGATACCATAGGAC | |
| 2589511 | ACGTTGGATGGTAGAGCTGACATCATAGGC | ACGTTGGATGCCTACTGTGTTAGCCTCACT | |
| 2060589 | ACGTTGGATGACAACTACGTGTAACTGTCC | ACGTTGGATGCCAATACCTTTAACACCCAAC | |
| 2164537 | ACGTTGGATGAACACACTTAGTACCCACGC | ACGTTGGATGCAAGGCAAAATGTTTCCAGC | |
| 2575678 | ACGTTGGATGAAGCACCATTTGTGGCTCAG | ACGTTGGATGCTTCAAGAGGCCATACAGAC | |
| 2575677 | ACGTTGGATGGAAGGATAAGCCACAGTGAG | ACGTTGGATGGATGCCAATTTGGTTTGCCC | |
| 2589510 | ACGTTGGATGAATGGCATGGGAACTTGGAC | ACGTTGGATGTGCACCACACTGAAGTGATC | |
| 2589509 | ACGTTGGATGATACGCAGGTTGTAGAGAGG | ACGTTGGATGTGAATCATGGTTGCCTCCTG | |
| 2164536 | ACGTTGGATGCTGGAGAACAAAAGACCACC | ACGTTGGATGGTGATGAAAACCATGTGAGC | |
| 2164535 | ACGTTGGATGGAATGATGTAAACGTTGGAG | ACGTTGGATGACCAGCACTATTACCCATGC | |
| 1946734 | ACGTTGGATGGTCAGCAAATCTGCCTTCAC | ACGTTGGATGAACCTGCTTTGTGGTCTTCG | |
| 2589525 | ACGTTGGATGGTATTTAAATTAGTGGTGTG | ACGTTGGATGAAGAACATTGAAAGAAGCAG | |
| 2589523 | ACGTTGGATGAGCAGGGTTAAATTTCCCAG | ACGTTGGATGTCATGTAGCTAAACAAAGGC | |
| 3755970 | ACGTTGGATGGTGACCATGTAGAAATCTGTG | ACGTTGGATGTACAACTAGTATCTACAGAC | |
| MAPK10-AA | ACGTTGGATGCTTGGGAAATAACAGGTGAC | ACGTTGGATGCACTTGTCTGTCTTAACACAC | |
| 2575675 | ACGTTGGATGTTGGGAAGGTACTAACAGCG | ACGTTGGATGTCGTACCTGCATAAGTGGTG | |
| 1202 | ACGTTGGATGTCAAGCAATAGAGACCACAG | ACGTTGGATGTAATCTCAGAATGGCAGCAC | |
| 1201 | ACGTTGGATGCCTGTGGTCTCTATTGCTTG | ACGTTGGATGTGCCAGTGCTCTGAAAACTG | |
| 2589516 | ACGTTGGATGACTCACACTGTGGTTTGGGG | ACGTTGGATGCATACTCTGCCAAAGTTTTA | |
| 2575674 | ACGTTGGATGCTCTCCTACTCTTTACTGTC | ACGTTGGATGGTGGGTAACAGTTTTCAGGC | |
| 2589515 | ACGTTGGATGGCCAAACCATTTTGTGCCTG | ACGTTGGATGCACCTGTATACCAATTTGTAG | |
| 3733367 | ACGTTGGATGCAGATGGGTTTATGTCAGAG | ACGTTGGATGGGCTCTACCAAGACATAATG | |
| 958 | ACGTTGGATGCCCAGTGCATTATGTCTTGG | ACGTTGGATGATCCGCATGTGTCTGTATTC | |
| 2589506 | ACGTTGGATGTGTTATGCGGGAGTATAAGG | ACGTTGGATGGCAACTCAGCTAGCCTTTAC | |
| 1436524 | ACGTTGGATGATTGTTTCCAGGGTGCTCTG | ACGTTGGATGGAGTTGCCAGTAGCTTTGAG | |
| 2575672 | ACGTTGGATGCTCCAGGAGCAAGGATTATG | ACGTTGGATGATAGTGTTATCACATAGACC | |
| 2589518 | ACGTTGGATGAATGATATGCACCGATCTTC | ACGTTGGATGCCAGGCAAAAAGAATGACCG | |
| 3775164 | ACGTTGGATGAAGTTTCCCTGGTCGTGATC | ACGTTGGATGGAACATGAAAAATTCATAAGC | |
| 2589514 | ACGTTGGATGCTTAAATGTCTCTAGAAAAGG | ACGTTGGATGTATACATTGTCCTGATAGAG | |
| 3775166 | ACGTTGGATGCTGAGGAGTCCATCATAGTG | ACGTTGGATGCTGTTTTTCACCCCCGATTC | |
| MAPK10-AB | ACGTTGGATGGATAAGTATTGGCTTAATCTG | ACGTTGGATGTTTCATTGCTCATGGATTAG | |
| 3775167 | ACGTTGGATGGCTTCTGATTTTATATGGCAC | ACGTTGGATGGAAACAAGCAGATGTCATGG | |
| 3822035 | ACGTTGGATGATAAATGCCTCCTTGCCTGC | ACGTTGGATGGAACTCCTGTTTATTGCCTAC | |
| 3775168 | ACGTTGGATGTCTCACATTGACTGGACAAC | ACGTTGGATGCCAAGCAGTTTGCGAAAATC | |
| 3775169 | ACGTTGGATGATGCTGAACAACAGGATGGG | ACGTTGGATGGGGAGAGAATGGTTGCATAT | |
| 2043650 | ACGTTGGATGCTGTGCCTTGCACATAGTAG | ACGTTGGATGGCTGAGGGAGAAATTGAGTG | |
| 2043649 | ACGTTGGATGGTCCTACTAGTCCCTGTATG | ACGTTGGATGGCACTACATGGGACACAAAG | |
| 3775170 | ACGTTGGATGCCCATTTTTGCTAGCAGGAG | ACGTTGGATGCCTAAGACCTATGCTCTCAC | |
| 1541998 | ACGTTGGATGCTGATTATTCTGATGGTAATG | ACGTTGGATGGCCCATGTTAACATTTTCTTC | |
| MAPK10-AC | ACGTTGGATGCTCTCTGCTAATTACAAGGC | ACGTTGGATGTACGTTTTGATGGGGTTGAG | |
| MAPK10-AD | ACGTTGGATGAGATACCTATTTGTGCCAGG | ACGTTGGATGTACGTTTTGATGGGGTTGAG | |
| MAPK10-AE | ACGTTGGATGTGTCTTTTCATGCCGAAAGC | ACGTTGGATGCGACAAACACTGACAATCAG | |
| 2282599 | ACGTTGGATGGACTGCTATTCTCTTAGACC | ACGTTGGATGCATTCTTGAGCAAATGTGAC | |
| MAPK10-AF | ACGTTGGATGGTCATATATCTGAGGTGGAG | ACGTTGGATGCAAGGTATTCTCGTGCATTG | |
| MAPK10-AG | ACGTTGGATGGTCATATATCTGAGGTGGAG | ACGTTGGATGCAAGGTATTCTCGTGCATTG | |
| MAPK10-AH | ACGTTGGATGCGAAATAAATGAGGGCAAGG | ACGTTGGATGGGAGGCTGCCGAATAAAAAC | |
| MAPK10-AI | ACGTTGGATGTGGGTCAGCAGCAAATATTG | ACGTTGGATGTGCCCTCATTTATTTCGGTG | |
| MAPK10-AJ | ACGTTGGATGTGGGTCAGCAGCAAATATTG | ACGTTGGATGTGCCCTCATTTATTTCGGTG | |
| 2282598 | ACGTTGGATGGTGAATGAAGGAAAAGTAGC | ACGTTGGATGCACGCCTAAGCAATTAATGAC | |
| 2282597 | ACGTTGGATGACACTTGATTACAATGGCCC | ACGTTGGATGGCATGGTTCTGTTATAAGGC | |
| 3775171 | ACGTTGGATGCTGTCATGATTCAAGCTACC | ACGTTGGATGTTTGGCTCATGAACAGCACC | |
| 3775172 | ACGTTGGATGCTGCAAAGTATCTGGCTATG | ACGTTGGATGGCTCCGTGAGTAGTTATTTC | |
| 3775173 | ACGTTGGATGTAAATTTGCAGAGGCCGTCG | ACGTTGGATGCAAGAGGGCTGCTTTAAACC | |
| 3775174 | ACGTTGGATGCATCCTTGATCCACCCTTTG | ACGTTGGATGCATGTCGTCAGAAGTGACAA | |
| 1469870 | ACGTTGGATGATGGCACAGTTTAGCATGTC | ACGTTGGATGATACTGAGCTCCATTTTGGG | |
| 1436522 | ACGTTGGATGATTGGAAGGAGGAAGCATAG | ACGTTGGATGGGAATTGAAATTGGCATTGC | |
| 1946733 | ACGTTGGATGTAGCTTCTAAACATCTCTTG | ACGTTGGATGGCAGGAGGATAGATCTGTAG | |
| 983362 | ACGTTGGATGCACATTGCTCCCTCCTTTAC | ACGTTGGATGGCGGCCGAAGAGTACTATTT | |
| 3755971 | ACGTTGGATGGTGGTAACAGATTGCTGTAC | ACGTTGGATGGCGTAAAGAACTTTTGGTGAC | |
| 3822036 | ACGTTGGATGCAACACATACCTTAGGTAAGA | ACGTTGGATGCTGAATTCCTTCGATGTTCC | |
| 3775175 | ACGTTGGATGCATTATAAAAACAGTTTCTTG | ACGTTGGATGGAGTAGACAGTGGCTATTAA | |
| 1436525 | ACGTTGGATGGCTTACACTAGCTACTTGGG | ACGTTGGATGGTGCAATCTTGGTTCACTGC | |
| 3822037 | ACGTTGGATGTCCCACCCTGACTTCTTTGC | ACGTTGGATGGTAATCCATAAACTGTGGGAG | |
| 3775176 | ACGTTGGATGTAGTCCAAGTATTTCCCAAG | ACGTTGGATGAAAAGGTCACCAGTGACCTG | |
| 993593 | ACGTTGGATGTAGGCACTGCAGATCTTTTC | ACGTTGGATGCACTAAAATAATAAGAAAGC | |
| | | | TC |
| 1436527 | ACGTTGGATGCTGTATAGAGAGCTGTTTGC | ACGTTGGATGAGCACTGTGAGTTAAACCTG | |
| 1436529 | ACGTTGGATGAATGTTGGACCACATGTACG | ACGTTGGATGCTATGGCAGCAGAAGAGTAG | |
| 3775180 | ACGTTGGATGTCCACTGAATGTGCACTTCC | ACGTTGGATGCAAGACTGTAGCCCTACAAC | |
| 3775181 | ACGTTGGATGCTTCTGCCAAGACTATCAGG | ACGTTGGATGGTAAGCATCCCCCTAATAAT | |
| 3775182 | ACGTTGGATGGCTGGACTCTATTAGGCCAT | ACGTTGGATGGATATCTCCCTCCTATTGGC | |
| 3775183 | ACGTTGGATGTGCAGATATGTAGGCCAAGC | ACGTTGGATGGATCTCTGATCTTAGACCAC | |
| 3775184 | ACGTTGGATGGTTCTACTTTGACCACAGGC | ACGTTGGATGGACCAGCAACCATGATGAAG | |
| 733245 | ACGTTGGATGTAGTCTAGTGGAGGATGTCG | ACGTTGGATGCCAGCTATAATGTAGACCAC | |
| 3775185 | ACGTTGGATGTGTGGAATCTATAATGTGTC | ACGTTGGATGACCTACCTCTTCTTTGCCAG | |
| 1561154 | ACGTTGGATGAATAGAAGATGCTCTAACTC | ACGTTGGATGGAAGATGCAAATAAGTCAACC | |
| 3775186 | ACGTTGGATGGATATGCTATGTGTGCTAAG | ACGTTGGATGTTGTACTTTGGTAGTTTGGG | |
| 3775187 | ACGTTGGATGAATCATGATCCCAGGGCAAG | ACGTTGGATGTAGCACCTTCAGGATCTTTC | |
| 1010778 | ACGTTGGATGGGATTTGTTCTTAATCTTTC | ACGTTGGATGCAGAGGAAAGAAAACTGAAAG | |
| 2282596 | ACGTTGGATGGGTGGCTTTGTGAAACCTTG | ACGTTGGATGTCATACTGATCAACCTGAAG | |
| 2282595 | ACGTTGGATGAAGGAAATTTGTCAGAGAGG | ACGTTGGATGCTTTTCCATCACATCAAGGG | |
| 2118044 | ACGTTGGATGGTCATTGCCTCTAGCTAGTG | ACGTTGGATGAACAACTTGGCTAATTCTAC | |
| 1469869 | ACGTTGGATGTTCGATATATCAGAGCCTTG | ACGTTGGATGCATGGCGAGGAAATCTGTTT | |
| MAPK10-AK | ACGTTGGATGTTTCTCTCGTTTCCTCTGTC | ACGTTGGATGACTTACACATCTTGGAACTC | |

[0298] TABLE 18

| | | |
|---|---|---|
| dbSNP rs# | Extend Primer | Term Mix |

| | | |
|---|---|---|
| 257568 | TTTCTTTTCTCTTTTAGGAATCT | ACG |
| 2575680 | GGATGCATGGTTTCTCTAAT | ACT |
| 2589505 | GTTTTAGCATAATTGCTTCTTTA | ACG |
| 2589504 | GTGCTAGGATCCTCAGT | ACG |
| 2164538 | GTCACATTCTTACCCTC | ACT |
| 2575679 | CTTCCTGGACATTAAATTGT | ACT |
| 10305 | AGCTAAATTGCAACAACA | ACG |
| 2869408 | CGAATCTCTTTAACTGCTG | ACT |
| 2904086 | GAATCTCTTTAACTGCTGGA | ACG |
| 934648 | ACTCTCCCACTGAGCAAGC | ACT |
| 2589511 | CTCCAAAGGATACCCAGA | ACG |
| 2060589 | ACTCTATCCATGTCTACAC | ACG |
| 2164537 | CGGCTTCTACTCTCTTATTCA | ACT |
| 2575678 | TGTGGCTCAGGTCCAGG | ACT |
| 2575677 | GGAATGAGGGCAACAGGA | ACT |
| 2589510 | TTTGGCAACAGGTAACCAGC | ACT |
| 2589509 | AGGGCTGCAGGGAAGAT | ACT |
| 2164536 | CCTGTGTTCCTTTGTATTTATAT | ACT |
| 2164535 | GATAAATGTGAGATTGAGAGA | CGT |
| 1946734 | GCATTCTAGTGGAGAAGTCA | ACT |
| 2589525 | TTAGTGGTGTGACTTGCA | ACG |
| 2589523 | TTTCCCAGATTAATTATCAGATT | ACG |
| 3755970 | GGTTTCTTCTAAAACTGACCT | ACT |
| MAPK10-AA | GGTGACTATTTAAGAAATATTTGG | ACT |
| 2575675 | GTTCTTGCCTGGTTTAC | ACG |
| 1202 | CCACCTGCACCATCGCCAT | ACT |
| 1201 | TTCTATTGCTTGAAGAGAGAAAG | ACT |
| 2589516 | GGTTTGGGGGTTTCATT | CGT |
| 2575674 | TATTCACACCTGCCTTC | CGT |
| 2589515 | GAAAACTGTTACCCACTC | ACT |
| 3733367 | GTAATAGATCACATGAAATGGAC | ACG |
| 958 | TTATGTCTTGGTAGAGCC | ACG |
| 2589506 | GAGAAGAAACCTGCCCA | ACG |
| 1436524 | CCAGGGTGCTCTGGTTTAATT | ACT |
| 2575672 | CAAGGATTATGTTAACCACT | ACG |
| 2589518 | TGCACCGATCTTCAAATAAA | ACG |
| 3775164 | TTTTTTGGGATCTTGATATTTTTA | ACT |
| 2589514 | AGAAAAGGTTTTTAAAGTCCTC | ACG |
| 3775166 | AACTTATGAAAGAATATGAAGGAT | ACT |
| MAPK10-AB | ATTGGCTTAATCTGTACATCAATT | ACG |
| 3775167 | TAAGAGAAGTCTTCAGTGCTT | ACG |
| 3822035 | CTGGATGATCCATTCAAG | CGT |
| 3775168 | ACTGGACAACTGAACAC | CGT |
| 3775169 | GCAGAGATTTTTCAAAATCTCTAA | ACT |
| 2043650 | GCACATAGTAGTAGCTCA | ACT |
| 2043649 | CCTCTTGTCTTATTATCCC | ACT |
| 3775170 | TTTTTAAAGCTGAAAATAAACCA | CGT |
| 1541998 | ATTATTCTGATGGTAATGATCCAG | ACG |
| MAPK10-AC | TAGAGCAGTAAAGGAATCTCAA | ACG |
| MAPK10-AD | TATTTGTGCCAGGCTCTCTG | ACG |
| MAPK10-AE | CATGCCGAAAGCAATGTCAC | ACT |
| 2282599 | CTAAAACTTCATCTGTCTTTTCA | ACT |
| MAPK10-AF | TCTGAGGTGGAGGCTGCC | ACT |
| MAPK10-AG | TCTGAGGTGGAGGCTGCC | ACT |
| MAPK10-AH | GGGCAAGGTATTCTCGTGC | ACT |
| MAPK10-AI | AATGAATCCTCCATAAGTTTACA | ACT |
| MAPK10-AJ | TTGCAATATGAATGAATCCTCC | ACT |
| 2282598 | AGGAAAAGTAGCTTCTGGG | ACG |
| 2282597 | CAGAAGCTACTTTTCCTTCA | ACG |
| 3775171 | GAATTAGAGAAGGGTCACT | ACT |
| 3775172 | TATGAAAATAGAAGACTTTGCC | ACG |
| 3775173 | GCCGTCGAACAAATACT | ACT |
| 3775174 | GCTTCTCTAAGTACAGCTC | ACT |
| 1469870 | CTTATATTCTCTGTGGCACCAA | ACT |
| 1436522 | GAGGAAGCATAGATTTGGTGT | ACT |
| 1946733 | CTAAACATCTCTTGAATATTCTG | ACG |
| 983362 | GCTCAAATGTTACCTTCTCAAA | ACT |
| 3755971 | AACAGCATTCTGGCATATA | ACG |
| 3822036 | CAGAAAAAGTGCTTGAGG | ACT |
| 3775175 | CAGTTTCTTGTGGTCCC | ACG |
| 1436525 | GGCTTAAACCTGGGAGG | ACG |
| 3822037 | TTTGCTTATTTCATAGAAGGAAT | ACT |
| 3775176 | TATTTCCCAAGTGCCCA | ACG |
| 993593 | AGCAACAGAGGCTTTTTCTA | ACG |
| 1436527 | GAGCTGTTTGCATTTATAACTCA | ACG |
| 1436529 | ACCACATGTACGTAAGGGGA | ACT |
| 3775180 | TATGTGTTGATGTCACTCTT | ACT |
| 3775181 | GGTTGGTATAGTACTTGCGAT | ACT |
| 3775182 | CTGTCAGTTGCCTTAGG | ACT |
| 3775183 | AGTCAAGACCAGCTGGG | ACG |
| 3775184 | CTCTTTCTTCTGATCCC | ACT |
| 733245 | CCTTAGATTCCCAAACAAAAC CGT | |
| 3775185 | TTTGGTTTAAACTAATGACACTA | ACT |
| 1561154 | AGATGCTCTAACTCTGGTTCA ACT | |
| 3775186 | GCTAAGCTAUAGTTATACTACGA | ACT |
| 3775187 | AGTGCATTACAGTGGTC | ACT |
| 1010778 | TTGAAATACTGTTTGTTTCCCCAA | ACT |
| 2282596 | GAAACCTTGCATGAACT | CGT |
| 2282595 | AAGTATGGAATAGTATCTTCCT ACT | |
| 2118044 | GTGGGGTTAGATATTATTTCCTGA | CGT |
| 1469869 | AAACACCATCTACTCTGAAGAA ACG | |
| MAPK10-AK | CGTTTCCTCTGTCCCTTCC | ACT |

Genetic Analysis of Allelotyping Results

[0299] Allelotyping results are shown for cases and controls in Table 19. The allele frequency for the A2 allele is noted in the fifth and sixth columns for breast cancer pools and control pools, respectively, where “AF” is allele frequency. SNPs with blank allele frequencies were untyped.

TABLE 19

| | Position in | | | | | | | Breast Cancer |
|---|---|---|---|---|---|---|---|---|
| | SEQ ID | Chromosome | A1/A2 | | | | | Associated |
| dbSNP rs# | NO: 2 | Position | Allele | Case AF | Control AF | p-Value | OR | Allele |
| 2575681 | 206 | 87372306 | C/T | C = 0.610 | C = 0.631 | 0.499 | 1.09 | T |
| | | | | T = 0.390 | T = 0.369 | | | |
| 2575680 | 1505 | 87373605 | A/G | A = 0.404 | A = 0.411 | 0.84 | 1.03 | G |
| | | | | G = 0.596 | G = 0.589 | | | |
| 2589505 | 3796 | 87375896 | C/T | C = 0.515 | C = 0.500 | 0.655 | 0.94 | C |
| | | | | T = 0.485 | T = 0.500 | | | |
| 2589504 | 3950 | 87376050 | G/A | G = 0.744 | G = 0.725 | 0.506 | 0.91 | G |
| | | | | A = 0.256 | A = 0.275 | | | |
| 2164538 | 4527 | 87376627 | T/C | T = 0.595 | T = 0.586 | 0.775 | 0.96 | T |
| | | | | C = 0.405 | C = 0.414 | | | |
| 2575679 | 7588 | 87379688 | A/G | A = 0.968 | A = 0.988 | 0.185 | 2.68 | G |
| | | | | G = 0.032 | G = 0.012 | | | |
| 10305 | 8482 | 87380582 | A/T | A = 0.303 | A = | | | |
| | | | | T = 0.697 | T = | | | |
| 2869408 | 9016 | 87381116 | C/G | C = 0.292 | C = 0.287 | 0.879 | 0.98 | C |
| | | | | G = 0.708 | G = 0.713 | | | |
| 2904086 | 9018 | 87381118 | C/T | C = 0.003 | C = 0.002 | 0.822 | 0.40 | C |
| | | | | T = 0.997 | T = 0.998 | | | |
| 934648 | 9747 | 87381847 | T/C | T = 0.345 | T = 0.337 | 0.786 | 0.96 | T |
| | | | | C = 0.655 | C = 0.663 | | | |
| 2589511 | 12207 | 87384307 | G/A | G = 0.599 | G = | | | |
| | | | | A = 0.401 | A = | | | |
| 2060589 | 13040 | 87385140 | G/A | G = 0.001 | G = 0.008 | 0.431 | 13.10 | A |
| | | | | A = 0.999 | A = 0.992 | | | |
| 2164537 | 13492 | 87385592 | T/C | T = 0.737 | T = 0.695 | 0.197 | 0.81 | T |
| | | | | C = 0.263 | C = 0.305 | | | |
| 2575678 | 13802 | 87385902 | A/C | A = 0.886 | A = 0.928 | 0.181 | 1.66 | C |
| | | | | C = 0.114 | C = 0.072 | | | |
| 2575677 | 13918 | 87386018 | G/C | G = 0.080 | G = 0.027 | 0.00252 | 0.32 | G |
| | | | | C = 0.920 | C = 0.973 | | | |
| 2589510 | 14153 | 87386253 | A/G | A = 0.592 | A = 0.582 | 0.767 | 0.96 | A |
| | | | | G = 0.408 | G = 0.418 | | | |
| 2589509 | 14370 | 87386470 | T/G | T = 0.799 | T = 0.785 | 0.599 | 0.92 | T |
| | | | | G = 0.201 | G = 0.215 | | | |
| 2164536 | 15068 | 87387168 | A/C | A = 0.378 | A = 0.398 | 0.509 | 1.09 | C |
| | | | | C = 0.622 | C = 0.602 | | | |
| 2164535 | 15474 | 87387574 | T/A | T = 0.430 | T = 0.426 | 0.891 | 0.98 | T |
| | | | | A = 0.570 | A = 0.574 | | | |
| 1946734 | 17117 | 87389217 | C/G | C = 0.003 | C = 0.001 | 0.782 | 0.22 | C |
| | | | | G = 0.997 | G = 0.999 | | | |
| 2589525 | 17777 | 87389877 | G/A | G = 0.607 | G = 0.606 | 0.983 | 1.00 | G |
| | | | | A = 0.393 | A = 0.394 | | | |
| 2589523 | 19497 | 87391597 | C/T | C = 0.225 | C = 0.186 | 0.139 | 0.79 | C |
| | | | | T = 0.775 | T = 0.814 | | | |
| 3755970 | 19646 | 87391746 | A/C | A = 0.880 | A = 0.894 | 0.525 | 1.15 | C |
| | | | | C = 0.120 | C = 0.106 | | | |
| MAPK10-AA | 21751 | 87393851 | A/C | A = 0.014 | A = | | | |
| | | | | C = 0.986 | C = | | | |
| 2575675 | 22185 | 87394285 | G/A | G = 0.347 | G = 0.305 | 0.154 | 0.83 | G |
| | | | | A = 0.653 | A = 0.695 | | | |
| 1202 | 22703 | 87394803 | T/C | T = 0.238 | T = 0.241 | 0.909 | 1.02 | C |
| | | | | C = 0.762 | C = 0.759 | | | |
| 1201 | 22763 | 87394863 | A/G | A = 0.872 | A = 0.883 | 0.611 | 1.11 | G |
| | | | | G = 0.128 | G = 0.117 | | | |
| 2589516 | 23391 | 87395491 | G/T | G = 0.575 | G = 0.519 | 0.0708 | 0.80 | G |
| | | | | T = 0.425 | T = 0.481 | | | |
| 2575674 | 23841 | 87395941 | A/T | A = 0.419 | A = 0.340 | 0.0107 | 0.71 | A |
| | | | | T = 0.581 | T = 0.660 | | | |
| 2589515 | 23883 | 87395983 | G/C | G = 0.586 | G = 0.544 | 0.211 | 0.84 | G |
| | | | | C = 0.414 | C = 0.456 | | | |
| 3733367 | 24132 | 87396232 | C/T | C = 1.000 | C = 1.000 | 0.957 | 0.54 | C |
| | | | | T = 0.000 | T = 0.000 | | | |
| 958 | 24169 | 87396269 | C/T | C = 0.833 | C = 0.842 | 0.69 | 1.07 | T |
| | | | | T = 0.167 | T = 0.158 | | | |
| 2589506 | 25987 | 87398087 | G/A | G = 0.568 | G = 0.51 | 0.0657 | 0.79 | G |
| | | | | A = 0.432 | A = 0.490 | | | |
| 1436524 | 26072 | 87398172 | A/G | A = 0.341 | A = 0.248 | 0.00126 | 0.64 | A |
| | | | | G = 0.659 | G = 0.752 | | | |
| 2575672 | 26376 | 87398476 | C/T | C = 0.726 | C = 0.814 | 0.00125 | 1.65 | T |
| | | | | T = 0.274 | T = 0.186 | | | |
| 2589518 | 26614 | 87398714 | G/A | G = 0.806 | G = 0.868 | 0.00984 | 1.58 | A |
| | | | | A = 0.194 | A = 0.132 | | | |
| 3775164 | 26727 | 87398827 | T/G | T = 0.934 | T = 0.921 | 0.523 | 0.83 | T |
| | | | | G = 0.066 | G = 0.079 | | | |
| 2589514 | 26827 | 87398927 | G/A | G = 0.556 | G = 0.639 | 0.0199 | 1.41 | A |
| | | | | A = 0.444 | A = 0.361 | | | |
| 3775166 | 27084 | 87399184 | T/C | T = 0.751 | T = 0.833 | 0.00351 | 1.65 | C |
| | | | | C = 0.249 | C = 0.167 | | | |
| MAPK10-AB | 30965 | 87403065 | G/A | G = 0.814 | G = 0.861 | 0.0453 | 1.42 | A |
| | | | | A = 0.186 | A = 0.139 | | | |
| 3775167 | 32436 | 87404536 | C/T | C = 0.845 | C = 0.850 | 0.858 | 1.04 | T |
| | | | | T = 0.155 | T = 0.150 | | | |
| 3822035 | 32821 | 87404921 | T/A | T = 0.998 | T = 1.000 | 0.761 | | A |
| | | | | A = 0.002 | A = 0 | | | |
| 3775168 | 32979 | 87405079 | A/T | A = 0.380 | A = 0.261 | 0.00252 | 0.57 | A |
| | | | | T = 0.620 | T = 0.739 | | | |
| 3775169 | 33572 | 87405672 | T/C | T = 0.829 | T = 0.870 | 0.106 | 1.38 | C |
| | | | | C = 0.171 | C = 0.130 | | | |
| 2043650 | 35142 | 87407242 | A/G | A = 0.308 | A = 0.215 | 0.00102 | 0.62 | A |
| | | | | G = 0.692 | G = 0.785 | | | |
| 2043649 | 35237 | 87407337 | T/G | T = 0.302 | T = 0.241 | 0.0305 | 0.73 | T |
| | | | | G = 0.698 | G = 0.759 | | | |
| 3775170 | 36014 | 87408114 | T/A | T = 0.791 | T = 0.784 | 0.782 | 0.96 | T |
| | | | | A = 0.209 | A = 0.216 | | | |
| 1541998 | 36439 | 87408539 | C/T | C = 0.283 | C = 0.228 | 0.0604 | 0.75 | C |
| | | | | T = 0.717 | T = 0.772 | | | |
| MAPK10-AC | 36838 | 87408938 | G/A | G = 0.034 | G = 0.013 | 0.176 | 0.36 | G |
| | | | | A = 0.966 | A = 0.987 | | | |
| MAPK10-AD | 36889 | 87408989 | G/A | G = 0.923 | G = 0.958 | 0.081 | 1.90 | A |
| | | | | A = 0.077 | A = 0.042 | | | |
| MAPK10-AE | 38639 | 87410739 | T/C | T = 0.919 | T = 0.931 | 0.491 | 1.20 | C |
| | | | | C = 0.081 | C = 0.069 | | | |
| 2282599 | 38657 | 87410757 | T/G | T = 1.000 | T = 1.000 | 0.976 | 0.64 | T |
| | | | | G = 0.000 | G = 0.000 | | | |
| MAPK10-AF | 38865 | 87410965 | T/C | T = 0.300 | T = 0.222 | 0.00536 | 0.66 | T |
| | | | | C = 0.700 | C = 0.778 | | | |
| MAPK10-AG | 38885 | 87410985 | A/G | A = 0.249 | A = 0.192 | 0.0626 | 0.71 | A |
| | | | | G = 0.751 | G = 0.808 | | | |
| MAPK10-AH | 38943 | 87411043 | T/C | T = 0.945 | T = 0.953 | 0.649 | 1.17 | C |
| | | | | C = 0.055 | C = 0.047 | | | |
| MAPK10-AI | 39035 | 87411135 | T/C | T = 0.128 | T = 0.058 | 0.000413 | 0.41 | T |
| | | | | C = 0.872 | C = 0.942 | | | |
| MAPK10-AJ | 39046 | 87411146 | T/C | T = 0.823 | T = 0.877 | 0.0241 | 1.53 | C |
| | | | | C = 0.177 | C = 0.123 | | | |
| 2282598 | 39218 | 87411318 | C/T | C = 0.971 | C = 0.966 | 0.735 | 0.86 | C |
| | | | | T = 0.029 | T = 0.034 | | | |
| 2282597 | 39241 | 87411341 | G/A | G = 0.184 | G = 0.197 | 0.613 | 1.09 | A |
| | | | | A = 0.816 | A = 0.803 | | | |
| 3775171 | 40105 | 87412205 | A/C | A = 1.000 | A = 1.000 | 0.998 | 0.94 | A |
| | | | | C = 0.000 | C = 0.000 | | | |
| 3775172 | 40240 | 87412340 | C/T | C = 0.003 | C = 0.003 | 0.995 | 0.98 | C |
| | | | | T = 0.997 | T = 0.997 | | | |
| 3775173 | 41162 | 87413262 | T/C | T = 0.841 | T = 0.852 | 0.652 | 1.09 | C |
| | | | | C = 0.159 | C = 0.148 | | | |
| 3775174 | 42477 | 87414577 | A/C | A = 1.000 | A = 0.999 | 0.947 | 0.55 | A |
| | | | | C = 0.000 | C = 0.001 | | | |
| 1469870 | 46191 | 87418291 | G/C | G = 0.884 | G = 0.934 | 0.013 | 1.85 | C |
| | | | | C = 0.116 | C = 0.066 | | | |
| 1436522 | 50467 | 87422567 | T/C | T = 0.84 | T = 0.876 | 0.122 | 1.34 | C |
| | | | | C = 0.160 | C = 0.124 | | | |
| 1946733 | 52934 | 87425034 | G/A | G = 0.763 | G = 0.773 | 0.709 | 1.06 | A |
| | | | | A = 0.237 | A = 0.227 | | | |
| 983362 | 54730 | 87426830 | T/C | T = 0.002 | T = 0.003 | 0.934 | 1.40 | C |
| | | | | C = 0.998 | C = 0.997 | | | |
| 3755971 | 58283 | 87430383 | C/T | C = 0.001 | C = 0.002 | 0.878 | 3.66 | T |
| | | | | T = 0.999 | T = 0.998 | | | |
| 3822036 | 58378 | 87430478 | C/G | C = 0 | C = 0.001 | 0.944 | | G |
| | | | | G = 1.000 | G = 0.999 | | | |
| 3775175 | 59505 | 87431605 | G/A | G = 0.001 | G = 0.005 | 0.67 | 4.64 | A |
| | | | | A = 0.999 | A = 0.995 | | | |
| 1436525 | 60229 | 87432329 | G/A | G = 0.945 | G = 0.961 | 0.297 | 1.43 | A |
| | | | | A = 0.055 | A = 0.039 | | | |
| 3822037 | 61108 | 87433208 | C/G | C = 0.054 | C = 0.085 | 0.102 | 1.61 | G |
| | | | | G = 0.946 | G = 0.915 | | | |
| 3775176 | 62587 | 87434687 | G/A | G = 0.034 | G = 0.088 | 0.0283 | 2.78 | A |
| | | | | A = 0.966 | A = 0.912 | | | |
| 993593 | 63133 | 87435233 | C/T | C = 0.998 | C = 1.000 | 0.789 | 99.16 | T |
| | | | | T = 0.002 | T = 0.000 | | | |
| 1436527 | 63616 | 87435716 | C/T | C = 0.709 | C = 0.75 | 0.155 | 1.23 | T |
| | | | | T = 0.291 | T = 0.250 | | | |
| 1436529 | 65377 | 87437477 | T/C | T = 0.448 | T = 0.463 | 0.642 | 1.06 | C |
| | | | | C = 0.552 | C = 0.537 | | | |
| 3775180 | 65442 | 87437542 | A/C | A = 1.000 | A = 1.000 | 0.957 | 4.50 | C |
| | | | | C = 0.000 | C = 0.000 | | | |
| 3775181 | 65548 | 87437648 | T/G | T = 0.758 | T = 0.729 | 0.36 | 0.86 | T |
| | | | | G = 0.242 | G = 0.271 | | | |
| 3775182 | 65878 | 87437978 | T/G | T = 0.143 | T = 0.13 | 0.592 | 0.90 | T |
| | | | | G = 0.857 | G = 0.870 | | | |
| 3775183 | 66222 | 87438322 | G/A | G = 0.446 | G = 0.392 | 0.13 | 0.80 | G |
| | | | | A = 0.554 | A = 0.608 | | | |
| 3775184 | 66354 | 87438454 | A/G | A = 0.828 | A = 0.818 | 0.715 | 0.94 | A |
| | | | | G = 0.172 | G = 0.182 | | | |
| 733245 | 67224 | 87439324 | A/T | A = 0.002 | A = 0.003 | 0.87 | 2.02 | T |
| | | | | T = 0.998 | T = 0.997 | | | |
| 3775185 | 68198 | 87440298 | T/G | T = 0.003 | T = 0.001 | 0.846 | 0.32 | T |
| | | | | G = 0.997 | G = 0.999 | | | |
| 1561154 | 68729 | 87440829 | T/C | T = 0.009 | T = 0.008 | 0.918 | 0.88 | T |
| | | | | C = 0.991 | C = 0.992 | | | |
| 3775186 | 69058 | 87441158 | A/C | A = 0.005 | A = 0.005 | 0.981 | 0.95 | A |
| | | | | C = 0.995 | C = 0.995 | | | |
| 3775187 | 69527 | 87441627 | T/C | T = 0.698 | T = 0.71 | 0.692 | 1.06 | C |
| | | | | C = 0.302 | C = 0.290 | | | |
| 1010778 | 70774 | 87442874 | A/G | A = 0.668 | A = 0.724 | 0.0721 | 1.31 | G |
| | | | | G = 0.332 | G = 0.276 | | | |
| 2282596 | 71232 | 87443332 | T/A | T = 0.265 | T = 0.267 | 0.94 | 1.01 | A |
| | | | | A = 0.735 | A = 0.733 | | | |
| 2282595 | 71943 | 87444043 | A/C | A = 1.000 | A = 1.000 | 0.984 | 0.00 | A |
| | | | | C = 0.000 | C = 0.000 | | | |
| 2118044 | 73397 | 87445497 | A/T | A = 0.656 | A = 0.681 | 0.444 | 1.12 | T |
| | | | | T = 0.344 | T = 0.319 | | | |
| 1469869 | 76322 | 87448422 | C/T | C = 0.615 | C = 0.666 | 0.103 | 1.24 | T |
| | | | | T = 0.385 | T = 0.334 | | | |
| MAPK10-AK | 110704 | 87482804 | A/G | A = 0.526 | A = 0.488 | 0.236 | 0.86 | A |
| | | | | G = 0.474 | G = 0.512 | | | |

[0300] FIG. 1B shows proximal SNPs in and around the MAPK10 region for females. The position of each SNP on the chromosome is presented on the x-axis. The y-axis gives the negative logarithm (base 10) of the p-value comparing the estimated allele in the case group to that of the control group. The minor allele frequency of the control group for each SNP designated by an X or other symbol on the graphs in FIG. 1B can be determined by consulting Table 19. By proceeding down the Table from top to bottom and across the graphs from left to right the allele frequency associated with each symbol shown can be determined.

[0301] To aid the interpretation, multiple lines have been added to the graph. The broken horizontal lines are drawn at two common significance levels, 0.05 and 0.01. The vertical broken lines are drawn every 20 kb to assist in the interpretation of distances between SNPs. Two other lines are drawn to expose linear trends in the association of SNPs to the disease. The light gray line (or generally bottom-most most curve) is a nonlinear smoother through the data points on the graph using a local polynomial regression method (W. S. Cleveland, E. Grosse and W. M. Shyu (1992) Local regression models. Chapter 8 of Statistical Models in S eds J. M. Chambers and T. J. Hastie, Wadsworth & Brooks/Cole.). The black line provides a local test for excess statistical significance to identify regions of association. This was created by use of a 10 kb sliding window with 1 kb step sizes. Within each window, a chi-square goodness of fit test was applied to compare the proportion of SNPs that were significant at a test wise level of 0.01, to the proportion that would be expected by chance alone (0.05 for the methods used here). Resulting p-values that were less than 10⁻⁸ were truncated at that value.

[0302] Finally, the gene or genes present in the loci region of the proximal SNPs as annotated by Locus Link (http address: www.ncbi.nlm.nih.gov/LocusLink/) are provided on the graph. The exons and introns of the genes in the covered region are plotted below each graph at the appropriate chromosomal positions. The gene boundary is indicated by the broken horizontal line. The exon positions are shown as thick, unbroken bars. An arrow is place at the 3′ end of each gene to show the direction of transcription.

### Example 6

### KIAA0861 Proximal SNPs

[0303] It has been discovered that a polymorphic variation (rs2001449) in a gene encoding KIAA0861 is associated with the occurrence of breast cancer (see Examples 1 and 2). Subsequently, SNP's proximal to the incident SNP (rs2001449) were identified and allelotyped in breast cancer sample sets and control sample sets as described in Examples 1 and 2. A total of seventy-five allelic variants located within or nearby the KIAA0861 gene were identified and fifty-severn allelic variants were allelotyped. The polymorphic variants are set forth in Table 20. The chromosome position provided in column four of Table 20 is based on Genome “Build 34” of NCBI's GenBank.

TABLE 20

| | Position in | | | | | |
|---|---|---|---|---|---|---|
| | SEQ ID | | Chromosome | Allele | Genome | Deduced |
| dbSNP rs# | NO: 3 | Chromosome | Position | Variants | Letter | Iupac |
| 3811728 | 246 | 3 | 184201246 | t/c | c | Y |
| 3811729 | 393 | 3 | 184201393 | a/g | a | R |
| 602646 | 628 | 3 | 184201628 | c/g | c | S |
| 488277 | 7586 | 3 | 184208586 | t/c | c | Y |
| 1629673 | 9223 | 3 | 184210223 | a/g | g | R |
| 670232 | 9933 | 3 | 184210933 | a/t | a | W |
| 575326 | 10154 | 3 | 184211154 | t/c | c | Y |
| 575386 | 10175 | 3 | 184211175 | c/g | c | S |
| 684846 | 10877 | 3 | 184211877 | t/c | c | Y |
| 471365 | 10907 | 3 | 184211907 | g/c | g | S |
| 496251 | 11289 | 3 | 184212289 | g/a | a | R |
| 831246 | 11793 | 3 | 184212793 | t/c | t | Y |
| 831247 | 11813 | 3 | 184212813 | g/c | g | S |
| KIAA0861-AA | 13507 | 3 | 184214507 | c/g | g | S |
| 512071 | 14249 | 3 | 184215249 | c/t | c | Y |
| 1502761 | 14586 | 3 | 184215586 | a/c | a | M |
| 681516 | 14647 | 3 | 184215647 | c/t | t | Y |
| 683302 | 15004 | 3 | 184216004 | c/t | t | Y |
| 619424 | 16573 | 3 | 184217573 | t/g | g | K |
| 620722 | 16811 | 3 | 184217811 | a/g | a | R |
| 529055 | 18921 | 3 | 184219921 | a/g | a | R |
| 664010 | 19651 | 3 | 184220651 | t/g | g | K |
| 678454 | 20565 | 3 | 184221565 | c/t | c | Y |
| 2653845 | 25239 | 3 | 184226239 | g/a | a | R |
| 472795 | 25721 | 3 | 184226721 | g/a | a | R |
| 507079 | 27133 | 3 | 184228133 | g/a | g | R |
| 534333 | 27778 | 3 | 184228778 | t/c | t | Y |
| 535298 | 27906 | 3 | 184228906 | t/c | t | Y |
| 536213 | 28000 | 3 | 184229000 | g/a | a | R |
| 831245 | 30005 | 3 | 184231005 | a/g | g | R |
| 639690 | 30520 | 3 | 184231520 | t/c | c | Y |
| 684174 | 32195 | 3 | 184233195 | t/c | c | Y |
| 571761 | 32439 | 3 | 184233439 | c/g | c | S |
| 1983421 | 33858 | 3 | 184234858 | t/c | t | Y |
| 4630966 | 41716 | 3 | 184242716 | c/t | t | Y |
| 2314415 | 42450 | 3 | 184243450 | t/g | c | M |
| 6788196 | 43554 | 3 | 184244554 | g/a | g | R |
| 2103062 | 44211 | 3 | 184245211 | a/g | g | R |
| 9827084 | 44775 | 3 | 184245775 | g/c | c | S |
| 9864865 | 44962 | 3 | 184245962 | a/g | a | R |
| 6804951 | 45317 | 3 | 184246317 | c/t | t | Y |
| 6770548 | 45712 | 3 | 184246712 | a/g | a | R |
| 1403452 | 45941 | 3 | 184246941 | t/c | c | Y |
| 7609994 | 46520 | 3 | 184247520 | g/t | t | K |
| 9838250 | 47175 | 3 | 184248175 | c/t | c | Y |
| 9863404 | 48045 | 3 | 184249045 | g/t | t | K |
| 903950 | 48636 | 3 | 184249636 | c/a | t | K |
| 6787284 | 48689 | 3 | 184249689 | g/a | g | R |
| 2017340 | 48704 | 3 | 184249704 | a/g | c | Y |
| 2001449 | 48849 | 3 | 184249849 | g/c | g | S |
| 1317288 | 48850 | 3 | 184249850 | g/a | g | R |
| 7635891 | 49931 | 3 | 184250931 | t/g | g | K |
| 10704581 | 51510 | 3 | 184252510 | —/tt | t | N |
| 11371910 | 51526 | 3 | 184252526 | —/a | c | N |
| 10937118 | 51758 | 3 | 184252758 | a/g | a | R |
| 7642053 | 51975 | 3 | 184252975 | c/g | g | S |
| 3821522 | 53475 | 3 | 184254475 | a/g | c | Y |
| 2029926 | 55524 | 3 | 184256524 | t/c | g | R |
| 1390831 | 56754 | 3 | 184257754 | t/g | a | M |
| 7643890 | 57473 | 3 | 184258473 | a/g | g | R |
| 11925606 | 57497 | 3 | 184258497 | a/c | c | M |
| 9826325 | 57613 | 3 | 184258613 | g/a | a | R |
| 6800429 | 58023 | 3 | 184259023 | g/a | g | R |
| 6803368 | 58821 | 3 | 184259821 | t/c | c | Y |
| 1353566 | 59644 | 3 | 184260644 | c/a | g | K |
| 2272115 | 66217 | 3 | 184267217 | g/a | a | R |
| 2272116 | 66344 | 3 | 184267344 | g/a | g | R |
| 3732603 | 67326 | 3 | 184268326 | g/c | c | S |
| 940055 | 69777 | 3 | 184270777 | a/c | a | M |
| 2314730 | 83594 | 3 | 184284594 | a/g | g | R |
| 2030578 | 84579 | 3 | 184285579 | g/c | g | S |
| 2049280 | 85623 | 3 | 184286623 | c/t | t | Y |
| 3732602 | 126831 | 3 | 184327831 | c/t | a | R |
| 2293203 | 137878 | 3 | 184338878 | a/t | t | W |
| 7639705 | 147455 | 3 | 184348455 | g/t | t | K |

Assays for Verifying and Allelotyping SNPs

[0304] The methods used to verify and allelotype the seventy-five proximal SNPs of Table 20 are the same methods described in Examples 1 and 2 herein. The PCR primers and extend primers used in these assays are provided in Table 21 and Table 22, respectively.

TABLE 21

| | | |
|---|---|---|
| dbSNP rs# | Forward PCR primer | Reverse PCR primer |

| | | |
|---|---|---|
| 3811728 | ACGTTGGATGACGTGTCGGTCCCCTTTCAT | ACGTTGGATGACGCGCCACACCTCCCTAC |
| 3811729 | ACGTTGGATGTGGGCGAGGTTCTGCAGCGT | ACGTTGGATGGTTTCGTTTCTCCGGCACAG |
| 602646 | ACGTTGGATGGAGGAGACCCAGGGTATGAG | ACGTTGGATGTCTGGGACCGTTTACCGCA |
| 488277 | ACGTTGGATGCACACATTCTTCTCAAGTGC | ACGTTGGATGGGAGGGACACAATTTAACTC |
| 1629673 | ACGTTGGATGGGCACCATGTGTGGCTAATT | ACGTTGGATGAAGGATCACGTGAAGTCAGG |
| 670232 | ACGTTGGATGGAAGGTGGAGCAGACATTAG | ACGTTGGATGACCTTAGTTATACCAGGCAC |
| 575326 | ACGTTGGATGACAGAGAGGCTTGGTCATAC | ACGTTGGATGGGTGCTTGGTTGTGATTCTC |
| 575386 | ACGTTGGATGATTCCTGCAGGTACTGTGTC | ACGTTGGATGTGAGCCCAAAACTACTGCTG |
| 684846 | ACGTTGGATGACCACCAGATAAAATCCCTC | ACGTTGGATGAAGTTCCTCTGGTGGACAAC |
| 471365 | ACGTTGGATGTGAGTGACATTTGTGTCACC | ACGTTGGATGCGGAGGATCTGAACAACTTC |
| 496251 | ACGTTGGATGGGGAGTCATTCCAATACCAG | ACGTTGGATGGGAGTGAAAGGTCATATTGG |
| 831246 | ACGTTGGATGCACAATCTGTTAGAATGGTGG | ACGTTGGATGCGTCAAGACTGAATGCATAG |
| 831247 | ACGTTGGATGGAAAATATAGTCCTACACAA | ACGTTGGATGCGTCAAGACTGAATGCATAG |
| KIAA0861-AA | ACGTTGGATGGTTCTAATGTCACCCCTTCC | ACGTTGGATGCAATGTGGCAAATTCTCTGG |
| 512071 | ACGTTGGATGCAAATCACCCCTGACAATTC | ACGTTGGATGACCAGCACACTCAGCTTTAG |
| 1502761 | ACGTTGGATGCAGAAATATGAAGGTGGCCC | ACGTTGGATGACCTTGAGCTCTGAGCCCTT |
| 681516 | ACGTTGGATGCTCCTCCTCAGAGGACTAAC | ACGTTGGATGAGCCCAAGGACTCATACAAC |
| 683302 | ACGTTGGATGAAACATGGCGAAACCCGGTC | ACGTTGGATGACCACGCCTGGCTAATTTTG |
| 619424 | ACGTTGGATGACCGGGAGCTCCCAGTCTG | ACGTTGGATGTGGGAATCGGTTGAGAGCCG |
| 620722 | ACGTTGGATGGCAGCAAAGAATTGCCCGGC | ACGTTGGATGTAAGGCGCCTGCAGAGGCGA |
| 529055 | ACGTTGGATGCTGCAGTTATCTGGGTGAGC | ACGTTGGATGCCAGAACGTGGCTTGTTGGG |
| 664010 | ACGTTGGATGTGGTACCTCCAGGTAAAATG | ACGTTGGATGTCCAGGCAGTCATTTTACCC |
| 678454 | ACGTTGGATGTTCTCTGCGGAGGAAAGTGC | ACGTTGGATGTTAAGCCAGTCCCCACAAGG |
| 2653845 | ACGTTGGATGATCACTTGGACTCAGGAAGC | ACGTTGGATGAGTCTTGCTCTGTTTCCAGG |
| 472795 | ACGTTGGATGTCACCTGAGCATCAGACATG | ACGTTGGATGATAGTGGAAGGAGAAACGGG |
| 507079 | ACGUGGATGAAGCCTCAGATGAGGCATAC | ACGTTGGATGTCTGAAAGGGTTCAGGAAGG |
| 534333 | ACGTTGGATGCGTTGATGCACTGAAGGGAG | ACGTTGGATGAGAGGCTAAATGTTGGCAGG |
| 535298 | ACGTTGGATGCAATTGCTCAGACCTTCACC | ACGTTGGATGAATGCTAGAGACATTGCACC |
| 536213 | ACGTTGGATGTGAGGACCTCATTATTGGTG | ACGTTGGATGCTGAGCAATCGAACTGCTAC |
| 831245 | ACGTTGGATGCTAGAATTACAGGTGCACAC | ACGTTGGATGGCCAAGATGGTGAAACCTTG |
| 639690 | ACGTTGGATGGCATTTTACCACCATGTGGTT | ACGTTGGATGCCTTCATGTTAATTCTGCCC |
| 684174 | ACGTTGGATGCTTTACTGAGTGGGCAAACG | ACGTTGGATGTCTAAGTGGAACTCAGCAGC |
| 571761 | ACGTTGGATGAATATCCTAGGCTAGCAGTG | ACGTTGGATGGTGCATAAATACATGAATAG |
| 1983421 | ACGTTGGATGTCCAGGTGTTATGGAGTCAG | ACGTTGGATGGGCTTCTTGTGCTGCTGTGT |
| 4630966 | ACGTTGGATGTCAACAAAGATGCCAAGACC | ACGTTGGATGGTGGATATCCATTGTCCTAG |
| 2314415 | ACGTTGGATGGGCTGAGTAACAGTCCATTG | ACGTTGGATGCTTACAGTATCCAAAAAGGG |
| 6788196 | ACGTTGGATGTCAAAGGTAGGTTACCCCTG | ACGTTGGATGATCCCCAATTTGCACATCCC |
| 2103062 | ACGTTGGATGTGCAGCCCTCAACCTTTCAG | ACGTTGGATGCCTTATTCAGTTACTATTACG |
| 9827084 | ACGTTGGATGAAACACACACACCCACATAC | ACGTTGGATGGGGAGAAAGAAAACAAAGGC |
| 9864865 | ACGTTGGATGCAATGCCTGCACTTAGACAC | ACGTTGGATGAGTGATGAGAACATGGGCTG |
| 6804951 | ACGTTGGATGGCAATAGGACTCCCTTTACC | ACGTTGGATGAAGATACGAATGGAGCCTGG |
| 6770548 | ACGTTGGATGTTTTTGAGCTTCACTGAGCG | ACGTTGGATGCGTATCTCTAGCTCAAGCAT |
| 1403452 | ACGTTGGATGCAGAAGTTAGGATGCAGATG | ACGTTGGATGCCAGTAGAGATAGAATTTTGG |
| 7609994 | ACGTTGGATGATACCTAGAGTTTGCCCAAC | ACGTTGGATGAGCTGAGATCAATCCCTATG |
| 9838250 | ACGTTGGATGGTGGCAGTCAAAACACAGTC | ACGTTGGATGACAGAGTAAGACTCCGTCTC |
| 9863404 | ACGTTGGATGGCTATTAGAAAGTCAGAGCC | ACGTTGGATGTGTTCCAGAAGGTGTAGAAG |
| 903950 | ACGTTGGATGCTTCAGTTCAGGGAGAGATC | ACGTTGGATGATAGGGCCCCCAGCATAAAA |
| 6787284 | ACGTTGGATGGCTTTCCCCTAAAGCATCTC | ACGTTGGATGGATCTCTCCCTGAACTGAAG |
| 2017340 | ACGTTGGATGTATTCCACTGCCTGCTTTCC | ACGTTGGATGGAAAACAGGAGGAAGTGGTG |
| 2001449 | ACGTTGGATGATGTCAAGTGCACCCACATG | ACGTTGGATGAGGAAGAAACTGACGGAAGG |
| 1317288 | ACGTTGGATGATGTCAAGTGCACCCACATG | ACGTTGGATGAGGAAGAAACTGACGGAAGG |
| 7635891 | ACGTTGGATGTCTCACCTTGCCTTTGGACG | ACGTTGGATGCTGATGTCGCAAGGAACCAC |
| 10704581 | ACGTTGGATGCCTGTTGAATTATGGAGGAG | ACGTTGGATGCTCTTCTTTCCATGGATCTTC |
| 11371910 | ACGTTGGATGCTCTTCTTTCCATGGATCTTC | ACGTTGGATGCAGCTAATTTCTCCTGACAG |
| 10937118 | ACGTTGGATGATGCAAACTGGCTGGGAATG | ACGTTGGATGGAGGAGGCTGTGAGAAAAGA |
| 7642053 | ACGTTGGATGATGCCCTGGATTGACCTAAC | ACGTTGGATGGGGTTAGGGTGTGTATAAGG |
| 3821522 | ACGTTGGATGAACCCGCACTACAAGATTCC | ACGTTGGATGGTCAGTCCCACATTCAGAAC |
| 2029926 | ACGTTGGATGTCCCGAACATAAAGACTCAG | ACGTTGGATGGGTTGTAATTGGAACATTGG |
| 1390831 | ACGTTGGATGGTCTGCCAAAGTTCCCTTAG | ACGTTGGATGAGGAAAGGGAAGAGAAACCG |
| 7643890 | ACGTTGGATGGACTGTGAGTTATAGGATAC | ACGTTGGATGATGGGTCGGAGGATTTATAG |
| 11925606 | ACGTTGGATGCTCGGCTAAGGTACTCAATA | ACGTTGGATGAGACCACCAAGTAAAATTGC |
| 9826325 | ACGTTGGATGTTGGGTTAATGCAGGGTCTG | ACGTTGGATGCTAGTTCACCTGGGTCTATC |
| 6800429 | ACGTTGGATGCCAAAGCCCATGTTTTAAAAA | ACGTTGGATGGTTTTTCTAAAATATGGGCT |
| 6803368 | ACGTTGGATGAAACCAGCTCAGGCCATTAC | ACGTTGGATGATGCAAAATAAGCTCTGCCC |
| 1353566 | ACGTTGGATGGGTGTACTCTGCCATTTGTC | ACGTTGGATGTGGAGGAGGTTCTAGTACCC |
| 2272115 | ACGTTGGATGAGTTGTGAGTGATTTCAGGG | ACGTTGGATGCAGGCCTTCTTGCTCTTATC |
| 2272116 | ACGTTGGATGCTGTGCCTTCTGAGTAGTTC | ACGTTGGATGATCTGTTGCCTTAGGTTCAC |
| 3732603 | ACGTTGGATGCTCTCAATTCCATCAGTCTC | ACGTTGGATGCTTTACGAATTTCACAACAGG |
| 940055 | ACGTTGGATGTATGCTTCCAGTCTCTGACC | ACGTTGGATGATAGGTAATCCAGTTGGGCC |
| 2314730 | ACGTTGGATGCTCAGGTAATCTGCCTTCTC | ACGTTGGATGCAGGGATAATGAGAACAAATC |
| 2030578 | ACGTTGGATGAACAACCTTACTTCATGCCC | ACGTTGGATGTTCTCCACTTTCTGGTCAAC |
| 2049280 | ACGTTGGATGTGGATACTGAGGGTCAACTG | ACGTTGGATGCTTCCCAACATTTTCGGCTC |

[0305] TABLE 22

| | | |
|---|---|---|
| dbSNP rs# | Extend Primer | Term Mix |

| | | |
|---|---|---|
| 3811728 | GTCCCCTTTCATCTAAAC | ACT |
| 3811729 | TCTGCAGCGTGCGGCGA | ACT |
| 602646 | CCAGGGTATGAGCGGAGGA | ACT |
| 488277 | AGTGCACACAGAACATTTAACA | ACT |
| 1629673 | TGTGGAGACAAGGTCTCACT | ACT |
| 670232 | TGGGCAAACAAGCCCAT | CGT |
| 575326 | TGGTCATACCCTTCAAG | ACT |
| 575386 | GAAGGGTATGACCAAGC | ACT |
| 684846 | AGTTGTTCAGATCCTCC | ACT |
| 471365 | TCCAAAACCACCAGATAAAATC | ACT |
| 496251 | GTATTGTCCTCCAGTGA | ACG |
| 831246 | AGAATGGTGGTGTATTTTTAC | ACT |
| 831247 | TAGTCCTACACAATCTGTTA | ACT |
| KIAA0861-AA | GGTATCAGGAAGAGTCA | ACT |
| 512071 | CCCTGACAATTCCAAAACTAA | ACG |
| 1502761 | GGAGGAGGCACTATTAAT | ACT |
| 681516 | GGCCACCTTCATATTTC | ACG |
| 683302 | CAGGAGATCCAGACCATCC | ACG |
| 619424 | TGCGGCCCCCGCCGGGTT | ACT |
| 620722 | GAATTGCCCGGCTCCGAAT | ACT |
| 529055 | GAGCAGGCAGCACAAGT | ACT |
| 664010 | ACCTCCAGGTAAAATGATTAGTT | ACT |
| 678454 | CAGGGATGGTAATTGAC | ACG |
| 2653845 | AAGCGGAGGTTGCAGTGAGC | ACG |
| 472795 | GACATGTCCCTCTCGGCCT | ACG |
| 507079 | GGCAATGTTTGCCCTTT | ACG |
| 534333 | GGGAGAAAGTAACAGGGTC | ACT |
| 535298 | CAGGTGGATGGGGACAC | ACT |
| 536213 | TGGTGTTAAGTGGCGTG | ACG |
| 831245 | CACACCACCACGCCCGGCT | ACT |
| 639690 | CTGCTATTCATTTGTGTAGA | ACT |
| 684174 | CTCTGATGTTACCTCCTCC | ACT |
| 571761 | CTAGGCTAGCAGTGGGGTTG | ACT |
| 1983421 | GGCAGGGAAGAGAAGAGC | ACT |
| 4630966 | AGATGCCAAGACCATTCAAAG | ACG |
| 2314415 | TAGTTGATGAAGATTTGGG | ACT |
| 6788196 | AGGTTACCCCTGCTGACTTT | ACG |
| 2103062 | GAGATCATTTCTCCTTCAAC | ACT |
| 9827084 | CCACACCCATATATATTTATGCT | ACT |
| 9864865 | AAAGATACACCGTTGAGAAGG | ACT |
| 6804951 | GACTCCCTTTACCTTCATGG | ACG |
| 6770548 | CTTCACTGAGCGTGGTGCC | ACT |
| 1403452 | CACAGATGCTCATGGGTCC | ACT |
| 7609994 | GTTTGCCCAACATATAAACAATAA | CGT |
| 9838250 | AACACAGTCAAAATTTTGCTTCA | ACG |
| 9863404 | GAGCCAAGTTTACATCAAGTTTA | CGT |
| 903950 | AGATCACATTGCCAACCCCCA | CGT |
| 6787284 | CCCGTCTCCTGCTGGTCA | ACG |
| 2017340 | CCCTAAAGCATCTCACAGCCCC | ACT |
| 2001449 | CACATGCCTGCTCGCCCCC | ACT |
| 1317288 | CACATGCCTGCTCGCCCC | ACG |
| 7635891 | TGCCTTTGGACGTCTAGCC | ACT |
| 10704581 | TATGGAGGAGTAGATATTGGAA | CGT |
| 11371910 | GAAAATTCCAATATCTACTCCTC | CGT |
| 10937118 | CTGGGAATGAAATTAGGGCAG | ACT |
| 7642053 | GTTCCCTTGACTTTCCTCAG | ACT |
| 3821522 | GCATCTTCAGGAATCTTG | ACT |
| 2029926 | CATAAAGACTCAGCATTCAGC | ACT |
| 1390831 | GGTTAGGAAGAAATCTGTG | ACT |
| 7643890 | ATCTAGATAATAAAGACCACCAA | ACT |
| 11925606 | CTATTAATGGTGTTTGTCTATGG | ACT |
| 9826325 | TAATGCAGGGTCTGCTGGAT | ACG |
| 6800429 | ATCTCTAAGATATAACACTCTAC | ACG |
| 6803368 | GTGCCTGCAAAGAAAGGAAC | ACT |
| 1353566 | TTGTCAGTTATGAGACCTTG | CGT |
| 2272115 | ATACCTCAGAATACAGCTTTTTTT | ACG |
| 2272116 | TCTCATTTCTCCTCTCTTTC | ACG |
| 3732603 | CTCATTTCCACCCTTCT | ACT |
| 940055 | GTCTCTGACCACTTGACCCA | ACT |
| 2314730 | TCCTTCTTCTCTGCTTT | ACT |
| 2030578 | TCATGCCCATTGGGTTAG | ACT |
| 2049280 | GGGTCAACTGTACCAAG | ACG |

### Genetic Analysis of Allelotyping Results

[0306] Allelotyping results are shown for cases and controls in Table 23. The allele frequency for the A2 allele is noted in the fifth and sixth columns for breast cancer pools and control pools, respectively, where “AF” is allele frequency. SNPs with blank allele frequencies were untyped (“not AT”).

TABLE 23

| | Position in | | | | | | | Breast Cancer |
|---|---|---|---|---|---|---|---|---|
| | SEQ ID | Chromosome | A1/A2 | | | | | Associated |
| dbSNP rs# | NO: 3 | Position | Allele | Case AF | Control AF | p-Value | OR | Allele |
| 3811728 | 246 | 184201246 | T/C | T = 0.002 | T = 0.003 | 0.952 | 1.28 | C |
| | | | | C = 0.998 | C = 0.997 | | | |
| 3811729 | 393 | 184201393 | A/G | A = 0.968 | A = 0.947 | 0.268 | 0.61 | A |
| | | | | G = 0.032 | G = 0.053 | | | |
| 602646 | 628 | 184201628 | C/G | C = | C = 0.344 | | | |
| | | | | G = | G = 0.656 | | | |
| 488277 | 7586 | 184208586 | T/C | T = 0.9 | T = 0.898 | 0.92 | 0.98 | T |
| | | | | C = 0.100 | C = 0.102 | | | |
| 1629673 | 9223 | 184210223 | A/G | A = 0.93 | A = 0.911 | 0.459 | 0.78 | A |
| | | | | G = 0.070 | G = 0.089 | | | |
| 670232 | 9933 | 184210933 | A/T | A = 0.138 | A = 0.137 | 0.951 | 0.99 | A |
| | | | | T = 0.862 | T = 0.863 | | | |
| 575326 | 10154 | 184211154 | T/C | T = 0.876 | T = 0.869 | 0.753 | 0.94 | T |
| | | | | C = 0.124 | C = 0.131 | | | |
| 575386 | 10175 | 184211175 | C/G | C = 0.224 | C = 0.221 | 0.921 | 0.98 | C |
| | | | | G = 0.776 | G = 0.779 | | | |
| 684846 | 10877 | 184211877 | T/C | T = 0.202 | T = | | | |
| | | | | C = 0.798 | C = | | | |
| 471365 | 10907 | 184211907 | G/C | G = 0.258 | G = 0.262 | 0.88 | 1.02 | C |
| | | | | C = 0.742 | C = 0.738 | | | |
| 496251 | 11289 | 184212289 | G/A | G = 0.841 | G = 0.839 | 0.967 | 0.99 | G |
| | | | | A = 0.159 | A = 0.161 | | | |
| 831246 | 11793 | 184212793 | T/C | T = 0.229 | T = 0.203 | 0.373 | 0.86 | T |
| | | | | C = 0.771 | C = 0.797 | | | |
| 831247 | 11813 | 184212813 | G/C | G = 0.17 | G = 0.178 | 0.755 | 1.06 | C |
| | | | | C = 0.830 | C = 0.822 | | | |
| KIAA0861- | 13507 | 184214507 | C/G | C = 0.745 | C = 0.762 | 0.557 | 1.10 | G |
| AA | | | | G = 0.255 | G = 0.238 | | | |
| 512071 | 14249 | 184215249 | C/T | C = 0.391 | C = 0.363 | 0.376 | 0.89 | C |
| | | | | T = 0.609 | T = 0.637 | | | |
| 1502761 | 14586 | 184215586 | A/C | A = 0.417 | A = 0.409 | 0.799 | 0.97 | A |
| | | | | C = 0.583 | C = 0.591 | | | |
| 681516 | 14647 | 184215647 | C/T | C = 0.762 | C = 0.817 | 0.0906 | 1.39 | T |
| | | | | T = 0.238 | T = 0.183 | | | |
| 683302 | 15004 | 184216004 | C/T | C = 0.729 | C = | | | |
| | | | | T = 0.271 | T = | | | |
| 619424 | 16573 | 184217573 | T/G | T = 0.925 | T = 0.929 | 0.812 | 1.06 | G |
| | | | | G = 0.075 | G = 0.071 | | | |
| 620722 | 16811 | 184217811 | A/G | T = | A = 0.181 | | | |
| | | | | G = | G = 0.819 | | | |
| 529055 | 18921 | 184219921 | A/G | A = 0.398 | A = 0.364 | 0.325 | 0.86 | A |
| | | | | G = 0.602 | G = 0.636 | | | |
| 664010 | 19651 | 184220651 | T/G | T = 0.549 | T = 0.607 | 0.145 | 1.27 | G |
| | | | | G = 0.451 | G = 0.393 | | | |
| 678454 | 20565 | 184221565 | C/T | C = 1.000 | C = 0.985 | 0.0998 | 0.00 | C |
| | | | | T = 0.000 | T = 0.015 | | | |
| 2653845 | 25239 | 184226239 | G/A | G = 0.825 | G = 0.827 | 0.94 | 1.01 | A |
| | | | | A = 0.175 | A = 0.173 | | | |
| 472795 | 25721 | 184226721 | G/A | G = 0.921 | G = 0.921 | 0.983 | 0.99 | G |
| | | | | A = 0.079 | A = 0.079 | | | |
| 507079 | 27133 | 184228133 | G/A | G = 0.166 | G = 0.167 | 0.979 | 1.00 | A |
| | | | | A = 0.834 | A = 0.833 | | | |
| 534333 | 27778 | 184228778 | T/C | T = 0.502 | T = 0.491 | 0.73 | 0.96 | T |
| | | | | C = 0.498 | C = 0.509 | | | |
| 535298 | 27906 | 184228906 | T/C | T = 0.275 | T = 0.228 | 0.127 | 0.78 | T |
| | | | | C = 0.725 | C = 0.772 | | | |
| 536213 | 28000 | 184229000 | G/A | G = 0.726 | G = 0.717 | 0.781 | 0.96 | G |
| | | | | A = 0.274 | A = 0.283 | | | |
| 831245 | 30005 | 184231005 | A/G | A = 0.979 | A = 0.981 | 0.843 | 1.12 | G |
| | | | | G = 0.021 | G = 0.019 | | | |
| 639690 | 30520 | 184231520 | T/C | T = 0.882 | T = 0.892 | 0.65 | 1.10 | C |
| | | | | C = 0.118 | C = 0.108 | | | |
| 684174 | 32195 | 184233195 | T/C | T = 0.698 | T = 0.708 | 0.756 | 1.05 | C |
| | | | | C = 0.302 | C = 0.292 | | | |
| 571761 | 32439 | 184233439 | C/G | C = 0.601 | C = 0.576 | 0.499 | 0.90 | C |
| | | | | G = 0.399 | G = 0.424 | | | |
| 1983421 | 33858 | 184234858 | T/C | T = 0.566 | T = 0.58 | 0.669 | 1.06 | C |
| | | | | C = 0.434 | C = 0.420 | | | |
| 4630966 | 41716 | 184242716 | C/T | C = 0.359 | C = 0.271 | 0.00247 | 0.66 | C |
| | | | | T = 0.641 | T = 0.729 | | | |
| 2314415 | 42450 | 184243450 | T/G | T = 0.974 | T = 0.951 | 0.124 | 0.53 | T |
| | | | | G = 0.026 | G = 0.049 | | | |
| 6788196 | 43554 | 184244554 | G/A | G = 1.000 | G = 1.000 | 0.967 | 0.00 | G |
| | | | | A = 0 | A = 0.000 | | | |
| 2103062 | 44211 | 184245211 | A/G | A = 0.674 | A = 0.642 | 0.381 | 0.87 | A |
| | | | | G = 0.326 | G = 0.358 | | | |
| 9827084 | 44775 | 184245775 | G/C | G = 0.966 | G = 0.928 | 0.0403 | 0.46 | G |
| | | | | C = 0.034 | C = 0.072 | | | |
| 9864865 | 44962 | 184245962 | A/G | A = 0.106 | A = 0.185 | 0.000529 | 1.93 | G |
| | | | | G = 0.894 | G = 0.815 | | | |
| 6804951 | 45317 | 184246317 | C/T | C = 0.96 | C = 0.904 | 0.00573 | 0.40 | C |
| | | | | T = 0.040 | T = 0.096 | | | |
| 6770548 | 45712 | 184246712 | A/G | A = 0.062 | A = 0.159 | 1.12E−05 | 2.86 | G |
| | | | | G = 0.938 | G = 0.841 | | | |
| 1403452 | 45941 | 184246941 | T/C | T = 0.97 | T = 0.932 | 0.0144 | 0.43 | T |
| | | | | C = 0.030 | C = 0.068 | | | |
| 7609994 | 46520 | 184247520 | G/T | G = 0.001 | G = 0.002 | 0.918 | 2.34 | T |
| | | | | T = 0.999 | T = 0.998 | | | |
| 9838250 | 47175 | 184248175 | C/T | C = 0.52 | C = 0.524 | 0.909 | 1.01 | T |
| | | | | T = 0.480 | T = 0.476 | | | |
| 9863404 | 48045 | 184249045 | G/T | G = 0.001 | G = 0.002 | 0.887 | 2.58 | T |
| | | | | T = 0.999 | T = 0.998 | | | |
| 903950 | 48636 | 184249636 | C/A | C = 0.417 | C = 0.406 | 0.739 | 0.96 | C |
| | | | | A = 0.583 | A = 0.594 | | | |
| 6787284 | 48689 | 184249689 | G/A | G = 0.475 | G = 0.501 | 0.416 | 1.11 | A |
| | | | | A = 0.525 | A = 0.499 | | | |
| 2017340 | 48704 | 184249704 | A/G | A = 0.965 | A = 0.945 | 0.195 | 0.63 | A |
| | | | | G = 0.035 | G = 0.055 | | | |
| 2001449 | 48849 | 184249849 | G/C | G = 0.738 | G = 0.797 | 0.0285 | 1.39 | C |
| | | | | C = 0.262 | C = 0.203 | | | |
| 1317288 | 48850 | 184249850 | G/A | G = 1.000 | G = 1.000 | 0.967 | 0.51 | G |
| | | | | A = 0.000 | A = 0.000 | | | |
| 7635891 | 49931 | 184250931 | T/G | T = 0.973 | T = 0.947 | 0.121 | 0.49 | T |
| | | | | G = 0.027 | G = 0.053 | | | |
| 10704581 | 51510 | 184252510 | —/TT | — = 0.998 | — = 0.997 | 0.949 | 0.83 | — |
| | | | | TT = 0.002 | TT = 0.003 | | | |
| 11371910 | 51526 | 184252526 | —/A | — = 1.000 | — = 1.000 | 0.977 | 0.00 | — |
| | | | | A = 0 | A = 0.000 | | | |
| 10937118 | 51758 | 184252758 | A/G | A = 0.495 | A = 0.51 | 0.629 | 1.06 | G |
| | | | | G = 0.505 | G = 0.490 | | | |
| 7642053 | 51975 | 184252975 | C/G | C = 0.002 | C = 0.003 | 0.908 | 1.85 | G |
| | | | | G = 0.998 | G = 0.997 | | | |
| 3821522 | 53475 | 184254475 | A/G | A = 0.504 | A = 0.52 | 0.62 | 1.07 | G |
| | | | | G = 0.496 | G = 0.480 | | | |
| 2029926 | 55524 | 184256524 | T/C | T = 0.001 | T = 0.001 | 0.975 | 2.52 | C |
| | | | | C = 0.999 | C = 0.999 | | | |
| 1390831 | 56754 | 184257754 | T/G | T = 0.057 | T = 0.076 | 0.284 | 1.36 | G |
| | | | | G = 0.943 | G = 0.924 | | | |
| 7643890 | 57473 | 184258473 | A/G | A = 0.001 | A = 0.002 | 0.934 | 2.30 | G |
| | | | | G = 0.999 | G = 0.998 | | | |
| 11925606 | 57497 | 184258497 | A/C | A = 0 | A = 0.001 | 0.956 | | C |
| | | | | C = 1.000 | C = 0.999 | | | |
| 9826325 | 57613 | 184258613 | G/A | G = 0.002 | G = 0.003 | 0.887 | 1.85 | A |
| | | | | A = 0.998 | A = 0.997 | | | |
| 6800429 | 58023 | 184259023 | G/A | G = 0.605 | G = 0.59 | 0.662 | 0.94 | G |
| | | | | A = 0.395 | A = 0.410 | | | |
| 6803368 | 58821 | 184259821 | T/C | T = 0.002 | T = 0.001 | 0.885 | 0.20 | T |
| | | | | C = 0.998 | C = 0.999 | | | |
| 1353566 | 59644 | 184260644 | C/A | C = 0.452 | C = 0.469 | 0.604 | 1.07 | A |
| | | | | A = 0.548 | A = 0.531 | | | |
| 2272115 | 66217 | 184267217 | G/A | G = 0.673 | G = 0.634 | 0.224 | 0.84 | G |
| | | | | A = 0.327 | A = 0.366 | | | |
| 2272116 | 66344 | 184267344 | G/A | G = 0.999 | G = 1.000 | 0.876 | 8.14 | A |
| | | | | A = 0.001 | A = 0.000 | | | |
| 3732603 | 67326 | 184268326 | G/C | G = 0.773 | G = 0.792 | 0.495 | 1.11 | C |
| | | | | C = 0.227 | C = 0.208 | | | |
| 940055 | 69777 | 184270777 | A/C | A = 0.778 | A = 0.803 | 0.356 | 1.17 | C |
| | | | | C = 0.222 | C = 0.197 | | | |
| 2314730 | 83594 | 184284594 | A/G | A = 0.352 | A = 0.311 | 0.183 | 0.83 | A |
| | | | | G = 0.648 | G = 0.689 | | | |
| 2030578 | 84579 | 184285579 | G/C | G = 1.000 | G = 1.000 | 0.963 | 0.33 | G |
| | | | | C = 0.000 | C = 0.000 | | | |
| 2049280 | 85623 | 184286623 | C/T | C = 0.001 | C = 0.005 | 0.576 | 30.94 | T |
| | | | | T = 0.999 | T = 0.995 | | | |

[0307] FIG. 1C shows proximal SNPs in and around the KIAA0861 gene for females. As indicated, some of the SNPs were untyped. The position of each SNP on the chromosome is presented on the x-axis. The y-axis gives the negative logarithm (base 10) of the p-value comparing the estimated allele in the case group to that of the control group. The minor allele frequency of the control group for each SNP designated by an X or other symbol on the graphs in FIG. 1C can be determined by consulting Table 23. By proceeding down the Table from top to bottom and across the graphs from left to right the allele frequency associated with each symbol shown can be determined.

[0308] To aid the interpretation, multiple lines have been added to the graph. The broken horizontal lines are drawn at two common significance levels, 0.05 and 0.01. The vertical broken lines are drawn every 20 kb to assist in the interpretation of distances between SNPs. Two other lines are drawn to expose linear trends in the association of SNPs to the disease. The light gray line (or generally bottom-most curve) is a nonlinear smoother through the data points on the graph using a local polynomial regression method (W. S. Cleveland, E. Grosse and W. M. Shyu (1992) Local regression models. Chapter 8 of Statistical Models in S eds J. M. Chambers and T. J. Hastie, Wadsworth & Brooks/Cole.). The black line provides a local test for excess statistical significance to identify regions of association. This was created by use of a 10 kb sliding window with 1 kb step sizes. Within each window, a chi-square goodness of fit test was applied to compare the proportion of SNPs that were significant at a test wise level of 0.01, to the proportion that would be expected by chance alone (0.05 for the methods used here). Resulting p-values that were less than 10⁻⁸ were truncated at that value.

[0309] Finally, the gene or genes present in the loci region of the proximal SNPs as annotated by Locus Link (http address: www.ncbi.nlm.nih.gov/LocusLink/) are provided on the graph. The exons and introns of the genes in the covered region are plotted below each graph at the appropriate chromosomal positions. The gene boundary is indicated by the broken horizontal line. The exon positions are shown as thick, unbroken bars. An arrow is place at the 3′ end of each gene to show the direction of transcription.

[0310] Additional Genotyping

[0311] A total of fourteen SNPs, including the incident SNP, were genotyped in the discovery cohort. The discovery cohort is described in Example 1. Four of the SNPs are non-synonomous, coding SNPs. Two of the SNPs (rs2001449 and rs6804951) were found to be significantly associated with breast cancer with a p-value of 0.001 and 0.007, respectively. See Table 26.

[0312] The methods used to verify and genotype the five proximal SNPs of Table 26 are the same methods described in Examples 1 and 2 herein. The PCR primers and extend primers used in these assays are provided in Table 24 and Table 25, respectively.

TABLE 24

| | | |
|---|---|---|
| dbSNP # | Forward PCR primer | Revee PCR primer |

| | | |
|---|---|---|
| 7639705 | ACGTTGGATGTGTCAGAAAGCAAACCTGGC | ACGTTGGATGTTACAGGCATTGGAGACAGC |
| 2293203 | ACGTTGGATGCTGCATAATGGTGGCTTTGG | ACGTTGGATGTGTGGGTGTTCACTTTGCAG |
| 3732602 | ACGTTGGATGCCCTCTTGTCAGGAAGTTCT | ACGTTGGATGGAGACAGAGTTGAACTCCCG |
| 2001449 | ACGTTGGATGAGGAAGAAACTGACGGAAGG | ACGTTGGATGATGTCAAGTGCACCCACATG |
| 6804951 | ACGTTGGATGAAGATACGAATGGAGCCTGG | ACGTTGGATGGCAATAGGACTCCCTTTACC |
| 3821522 | ACGTTGGATGCGCACTACAAGATTCCAAGC | ACGTTGGATGTCAGTCCCACATTCAGAACC |
| 2293203 | ACGTTGGATGTGTGGGTGTTCACTTTGCAG | ACGTTGGATGCTGCATAATGGTGGCTTTGG |
| 3811729 | ACGTTGGATGTGGGCGAGGTTCTGCAGCGT | ACGTTGGATGGTTTCGTTTCTCCGGCACAG |
| 534333 | ACGTTGGATGGATGCACTGAAGGGAGAAAG | ACGTTGGATGAGAGGCTAAATGTTGGCAGG |
| 575326 | ACGTTGGATGTGAGCCCAAAACTACTGCTG | ACGTTGGATGATTCCTGCAGGTACTGTGTC |
| 2272115 | ACGTTGGATGCAGGCCTTCTTGCTCTTATC | ACGTTGGATGAGTTGTGAGTGATTTCAGGG |
| 940055 | ACGTTGGATGTATGCTTCCAGTCTCTGACC | ACGTTGGATGGATAGGTAATCCAGTTGGGC |
| 2017340 | ACGTTGGATGGATCTCTCCCTGAACTGAAG | ACGTTGGATGGCTTTCCCCTAAAGCATCTC |
| 571761 | ACGTTGGATGAATATCCTAGGCTAGCAGTG | ACGTTGGATGGTGCATAAATACATGAATAG |

[0313] TABLE 25

| | | |
|---|---|---|
| dbSNP # | Extend Primer | Term Mix |

| | | |
|---|---|---|
| 7639705 | TGATGCACGTGGAGCAG | CGT |
| 2293203 | GCCCCTGGAAAAGGCCC | CGT |
| 3732602 | GGAAGATGATGAGACTAAAT | ACG |
| 2001449 | CACATGCCTGCTCGCCCCC | ACT |
| 6804951 | TCCCTTTACCTTCATGG | ACG |
| 3821522 | GCATCTTCAGGAATCTTG | ACT |
| 2293203 | GCCCCTGGAAAAGGCCC | CGT |
| 3811729 | GGTTCTGCAGCGTGCGGCGA | ACT |
| 534333 | GAAGGGAGAAAGTAACAGGGTC | ACT |
| 575326 | TGGTCATACCCTTCAAG | ACT |
| 2272115 | ATCTTCTACACATTGATTCAG | ACT |
| 940055 | TCTCTGACCACTTGACCCA | ACT |
| 2017340 | TGGTGACCAGCAGGAGA | ACG |
| 571761 | GGCTAGCAGTGGGGTTG | ACT |

[0314] Table 26, below, shows the case and control allele frequencies along with the p-values for all of the SNPs genotyped. The disease associated allele of column 4 is in bold and the disease associated amino acid of column 5 is also in bold. The chromosome positions provided correspond to NCBI's Build 34. The amino acid change positions provided in column 5 correspond to KIAA0861 polypeptide sequence of SEQ ID NO: 22. The corresponding amino acid position in the alternative KIAA0861 polypeptide sequence (NP_{—}055893) can be easily calculated by adding 83 amino acids to the positions provided in column 5.

TABLE 26
Genotyping Results

| | | | | | | | | | Breast |
|---|---|---|---|---|---|---|---|---|---|
| | Position in | | | Amino | | | | | Cancer |
| | SEQ ID | Chromosome | Alleles | Acid | | AF F | | Odds | Associated |
| dbSNP rs# | NO: 3 | Position | (A1/A2) | Change | AF F case | control | p-value | Ratio | Allele |
| 3811729 | 393 | 184201393 | A/G | | A = 0.917 | A = 0.948 | 0.0542 | 1.65 | G |
| | | | | | G = 0.083 | G = 0.052 | | | |
| 575326 | 10154 | 184211154 | T/C | | T = 0.897 | T = 0.885 | 0.545 | 0.88 | T |
| | | | | | C = 0.103 | C = 0.115 | | | |
| 534333 | 27778 | 184228778 | T/C | | T = 0.254 | T = 0.249 | 0.85 | 0.97 | T |
| | | | | | C = 0.746 | C = 0.751 | | | |
| 571761 | 32439 | 184233439 | C/G | | C = 0.487 | C = 0.465 | 0.492 | 0.92 | C |
| | | | | | G = 0.513 | G = 0.535 | | | |
| 6804951 | 45317 | 184246317 | C/T | A819T | C = 0.956 | C = 0.915 | 0.007 | 2.02 | C |
| | | | | | T = 0.044 | T = 0.085 | | | |
| 2017340 | 48704 | 184249704 | G/A | | G = 0.027 | G = 0.042 | 0.203 | 1.57 | A |
| | | | | | A = 0.973 | A = 0.958 | | | |
| 2001449 | 48849 | 184249849 | G/C | | G = 0.693 | G = 0.782 | 0.001 | 1.59 | C |
| | | | | | C = 0.307 | C = 0.218 | | | |
| 3821522 | 53475 | 184254475 | A/G | | A = 0.372 | A = 0.391 | 0.539 | 1.08 | G |
| | | | | | G = 0.628 | G = 0.609 | | | |
| 2272115 | 66217 | 184267217 | A/G | | A = 0.407 | A = 0.444 | 0.246 | 1.16 | G |
| | | | | | G = 0.593 | G = 0.556 | | | |
| 940055 | 69777 | 184270777 | A/C | | A = 0.702 | A = 0.753 | 0.0721 | 1.29 | C |
| | | | | | C = 0.298 | C = 0.247 | | | |
| 3732602 | 126831 | 184327831 | C/T | S506F | C = 0.008 | C = 0.012 | 0.597 | 1.41 | T |
| | | | | | T = 0.992 | T = 0.988 | | | |
| 2293203 | 137878 | 184338878 | A/T | L295Q | A = 0.012 | A = 0.015 | 0.690 | 1.24 | T |
| | | | | | T = 0.988 | T = 0.985 | | | |
| 7639705 | 147455 | 184348455 | G/T | I276L | G = 0.195 | G = 0.189 | 0.794 | 1.04 | G |
| | | | | | T = 0.805 | T = 0.811 | | | |

### Example 7

### NUMA1 Region Proximal SNPs

[0315] It has been discovered that a polymorphic variation (rs673478) in the NUMA1/FLJ20625/LOC220074 region is associated with the occurrence of breast cancer (see Examples 1 and 2). Subsequently, SNPs proximal to the incident SNP (rs673478) were identified and allelotyped in breast cancer sample sets and control sample sets as described in Examples 1 and 2. Approximately 327 allelic variants located within the NUMA1/FLJ20625/LOC220074 region were identified and allelotyped. The polymorphic variants are set forth in Table 27. The chromosome position provided in column four of Table 27 is based on Genome “Build 34” of NCBI's GenBank.

TABLE 27

| | Position in | | Chromosome | Allele | Genome | Deduced |
|---|---|---|---|---|---|---|
| dbSNP rs# | SEQ ID NO: 4 | Chromosome | Position | Variants | Letter | Iupac |
| 4945392 | 203 | 11 | 71420953 | t/c | c | Y |
| 7938496 | 1236 | 11 | 71421986 | g/a | a | R |
| 7926550 | 1768 | 11 | 71422518 | c/g | g | S |
| 7945374 | 2101 | 11 | 71422851 | a/t | t | W |
| 7949480 | 3146 | 11 | 71423896 | t/c | t | Y |
| 7102523 | 4476 | 11 | 71425226 | t/c | t | Y |
| 7121260 | 6124 | 11 | 71426874 | a/g | g | R |
| 7131230 | 6719 | 11 | 71427469 | c/t | t | Y |
| 7128317 | 6925 | 11 | 71427675 | g/a | a | R |
| 2276385 | 7060 | 11 | 71427810 | c/g | g | S |
| 2276384 | 7081 | 11 | 71427831 | t/c | g | R |
| 2276383 | 7090 | 11 | 71427840 | a/g | c | Y |
| 1892921 | 7696 | 11 | 71428446 | c/t | g | R |
| 1892920 | 7989 | 11 | 71428739 | c/t | a | R |
| 7942626 | 9407 | 11 | 71430157 | g/a | g | R |
| 7124429 | 9699 | 11 | 71430449 | t/g | g | K |
| 7114081 | 9905 | 11 | 71430655 | a/t | t | W |
| 7125718 | 9984 | 11 | 71430734 | c/t | c | Y |
| 1055452 | 13023 | 11 | 71433773 | t/c | t | Y |
| 3829215 | 13047 | 11 | 71433797 | g/a | t | Y |
| 1541306 | 13571 | 11 | 71434321 | c/t | g | R |
| 3814722 | 14086 | 11 | 71434836 | c/a | g | K |
| 1939240 | 14337 | 11 | 71435087 | t/a | t | W |
| 5743655 | 14462 | 11 | 71435212 | t/c | c | Y |
| 5743656 | 14518 | 11 | 71435268 | a/g | g | R |
| 5743657 | 14695 | 11 | 71435445 | a/g | g | R |
| 3814721 | 14830 | 11 | 71435580 | g/a | c | Y |
| 5743658 | 15282 | 11 | 71436032 | c/a | a | M |
| 5743659 | 15436 | 11 | 71436186 | a/g | g | R |
| 5743660 | 15745 | 11 | 71436495 | g/a | g | R |
| 5743661 | 15748 | 11 | 71436498 | g/t | g | K |
| 5743662 | 15797 | 11 | 71436547 | t/c | t | Y |
| 2298455 | 16036 | 11 | 71436786 | t/g | a | M |
| 5743664 | 16646 | 11 | 71437396 | g/a | g | R |
| 5743665 | 16713 | 11 | 71437463 | a/g | a | R |
| 5743667 | 16859 | 11 | 71437609 | g/a | g | R |
| 5743668 | 16914 | 11 | 71437664 | g/— | c | N |
| 5743669 | 17422 | 11 | 71438172 | c/t | c | Y |
| 1573503 | 17499 | 11 | 71438249 | a/g | t | Y |
| 5743670 | 17646 | 11 | 71438396 | g/c | c | S |
| 5743671 | 17681 | 11 | 71438431 | g/a | g | R |
| 1892919 | 17733 | 11 | 71438483 | c/t | g | R |
| 5743672 | 17841 | 11 | 71438591 | g/a | g | R |
| 2735786 | 17963 | 11 | 71438713 | a/g | g | R |
| 5743673 | 18011 | 11 | 71438761 | g/a | g | R |
| 5743674 | 18238 | 11 | 71438988 | a/t | a | W |
| 1062452 | 18569 | 11 | 71439319 | c/a | c | M |
| 5743675 | 18672 | 11 | 71439422 | t/c | c | Y |
| 5743676 | 18715 | 11 | 71439465 | a/g | g | R |
| 760246 | 18927 | 11 | 71439677 | c/t | t | Y |
| 11345794 | 19266 | 11 | 71440016 | t/— | t | N |
| 5743677 | 19290 | 11 | 71440040 | c/t | c | Y |
| 5743678 | 19456 | 11 | 71440206 | t/g | t | K |
| 14537 | 19511 | 11 | 71440261 | c/t | g | R |
| 3168177 | 19575 | 11 | 71440325 | g/a | c | Y |
| 5743679 | 19591 | 11 | 71440341 | g/a | g | R |
| 1541304 | 19636 | 11 | 71440386 | g/a | t | Y |
| 1053725 | 19770 | 11 | 71440520 | a/g | c | Y |
| 5743680 | 20002 | 11 | 71440752 | g/a | a | R |
| 949324 | 20084 | 11 | 71440834 | g/c | g | S |
| 949323 | 20086 | 11 | 71440836 | a/c | t | K |
| 5743681 | 20246 | 11 | 71440996 | t/c | c | Y |
| 5743682 | 20253 | 11 | 71441003 | t/c | t | Y |
| 5743683 | 20300 | 11 | 71441050 | g/a | g | R |
| 5743684 | 20539 | 11 | 71441289 | g/a | g | R |
| 5743685 | 20682 | 11 | 71441432 | c/t | c | Y |
| 2845857 | 20773 | 11 | 71441523 | g/c | c | S |
| 2852365 | 20776 | 11 | 71441526 | g/a | t | Y |
| 11538641 | 20904 | 11 | 71441654 | c/a | g | K |
| 11538639 | 20918 | 11 | 71441668 | c/t | g | R |
| 11235417 | 20978 | 11 | 71441728 | a/g | g | R |
| 11538644 | 21269 | 11 | 71442019 | c/a | g | K |
| 11538643 | 21354 | 11 | 71442104 | c/t | g | R |
| 2845858 | 21488 | 11 | 71442238 | t/c | c | Y |
| 2155146 | 21656 | 11 | 71442406 | g/t | a | M |
| 2852364 | 21793 | 11 | 71442543 | t/c | g | R |
| 2845859 | 22084 | 11 | 71442834 | a/g | a | R |
| 2845860 | 22219 | 11 | 71442969 | t/c | c | Y |
| 11538642 | 22815 | 11 | 71443565 | g/t | c | M |
| 7949430 | 22858 | 11 | 71443608 | t/c | c | Y |
| 7938674 | 22895 | 11 | 71443645 | t/c | t | Y |
| 2735787 | 23431 | 11 | 71444181 | c/t | t | Y |
| 11538640 | 23968 | 11 | 71444718 | c/t | a | R |
| 10736784 | 24469 | 11 | 71445219 | t/a | t | W |
| 10736785 | 24470 | 11 | 71445220 | a/c | c | M |
| 11826059 | 24853 | 11 | 71445603 | t/c | t | Y |
| 2503 | 24961 | 11 | 71445711 | t/c | t | Y |
| 2155145 | 25177 | 11 | 71445927 | a/c | g | K |
| 4477459 | 26174 | 11 | 71446924 | t/c | t | Y |
| NUMA1-AA | 26334 | 11 | 71447084 | t/— | t | N |
| 5019605 | 26337 | 11 | 71447087 | c/g | c | S |
| 5019604 | 26338 | 11 | 71447088 | a/t | t | W |
| 5019603 | 26339 | 11 | 71447089 | c/g | c | S |
| 3793941 | 26965 | 11 | 71447715 | g/a | c | Y |
| 11235418 | 27278 | 11 | 71448028 | c/g | c | S |
| 3793940 | 28042 | 11 | 71448792 | a/g | c | Y |
| 2032353 | 28520 | 11 | 71449270 | g/t | c | M |
| 3934448 | 28533 | 11 | 71449283 | g/t | c | M |
| 7951267 | 28764 | 11 | 71449514 | a/g | g | R |
| 1053603 | 29685 | 11 | 71450435 | g/a | c | Y |
| 1053602 | 30738 | 11 | 71451488 | a/g | c | Y |
| 11235419 | 31175 | 11 | 71451925 | t/c | c | Y |
| 1053601 | 31490 | 11 | 71452240 | a/g | c | Y |
| 3750913 | 31726 | 11 | 71452476 | g/c | g | S |
| 3750912 | 31770 | 11 | 71452520 | a/g | c | Y |
| 1053600 | 31792 | 11 | 71452542 | t/a | t | W |
| 1057992 | 32980 | 11 | 71453730 | c/a | a | M |
| 2298789 | 33398 | 11 | 71454148 | a/g | t | Y |
| 10898813 | 33580 | 11 | 71454330 | t/a | t | W |
| 11278712 | 34468-34472 | 11 | 71455218\hat{ } | —/gtcaac | gtcaac | NNNNN |
| | | | 71455222 | | | |
| NUMA1-AB | 34941 | 11 | 71455691 | c/t | t | Y |
| 949325 | 35214 | 11 | 71455964 | g/a | a | R |
| NUMA1-AC | 35629 | 11 | 71456379 | g/c | c | S |
| 949326 | 35864 | 11 | 71456614 | t/c | c | Y |
| 2298456 | 36273 | 11 | 71457023 | a/t | t | W |
| 7949845 | 37281 | 11 | 71458031 | a/g | a | R |
| 7949989 | 37378 | 11 | 71458128 | a/g | a | R |
| 1573500 | 38348 | 11 | 71459098 | c/g | c | S |
| 4945411 | 38608 | 11 | 71459358 | a/g | g | R |
| 3831387 | 38627-38628 | 11 | 71459377\hat{ } | ca/— | ca | NN |
| | | | 71459378 | | | |
| 11235422 | 39049 | 11 | 71459799 | c/a | c | M |
| 10128658 | 39077 | 11 | 71459827 | c/t | c | Y |
| 2298457 | 39769 | 11 | 71460519 | t/c | t | Y |
| 3838779 | 40555 | 11 | 71461305 | t/— | c | N |
| 1573501 | 41251 | 11 | 71462001 | t/c | c | Y |
| 11235424 | 41270 | 11 | 71462020 | c/t | c | Y |
| 10898814 | 42063 | 11 | 71462813 | t/c | t | Y |
| 7930142 | 42574 | 11 | 71463324 | t/c | c | Y |
| 7930544 | 42912 | 11 | 71463662 | c/t | c | Y |
| 7930721 | 43039 | 11 | 71463789 | a/c | c | M |
| 7930722 | 43042 | 11 | 71463792 | c/g | c | S |
| 6592456 | 43221 | 11 | 71463971 | a/g | g | R |
| 11235425 | 43518 | 11 | 71464268 | t/c | c | Y |
| 6592457 | 43644 | 11 | 71464394 | g/c | g | S |
| 10898815 | 44981 | 11 | 71465731 | a/g | g | R |
| 11235426 | 45013 | 11 | 71465763 | t/c | c | Y |
| 10898816 | 45038 | 11 | 71465788 | c/t | c | Y |
| 1939247 | 46079 | 11 | 71466829 | t/a | a | W |
| 1939246 | 47848 | 11 | 71468598 | t/g | a | M |
| 1939245 | 48090 | 11 | 71468840 | a/g | c | Y |
| 1939244 | 48147 | 11 | 71468897 | g/t | c | M |
| 1939243 | 48293 | 11 | 71469043 | c/t | g | R |
| 4245463 | 48771 | 11 | 71469521 | c/a | c | M |
| 4944258 | 48951 | 11 | 71469701 | a/t | t | W |
| 7926751 | 49972 | 11 | 71470722 | t/g | t | K |
| 12282917 | 50161 | 11 | 71470911 | g/a | g | R |
| 12282918 | 50163 | 11 | 71470913 | g/a | g | R |
| 7937582 | 50171 | 11 | 71470921 | t/c | c | Y |
| 10898817 | 51289 | 11 | 71472039 | t/c | c | Y |
| 7480015 | 51699 | 11 | 71472449 | g/a | a | R |
| 7123992 | 52005 | 11 | 71472755 | c/t | c | Y |
| 1573502 | 52986 | 11 | 71473736 | g/a | c | Y |
| 7127865 | 53339 | 11 | 71474089 | g/c | g | S |
| 4945426 | 53704 | 11 | 71474454 | c/a | c | M |
| 11235428 | 54615 | 11 | 71475365 | g/c | g | S |
| 7122489 | 55307 | 11 | 71476057 | a/c | a | M |
| 1894003 | 55834 | 11 | 71476584 | t/c | a | R |
| 1548348 | 56475 | 11 | 71477225 | g/a | a | R |
| 1892923 | 57053 | 11 | 71477803 | g/a | c | Y |
| 5792570 | 57355 | 11 | 71478105 | —/g | g | N |
| 7115200 | 57718 | 11 | 71478468 | t/g | t | K |
| 4945430 | 58703 | 11 | 71479453 | g/c | g | S |
| 11235429 | 58772 | 11 | 71479522 | c/t | t | Y |
| 1939242 | 59140 | 11 | 71479890 | c/t | g | R |
| 9666346 | 59450 | 11 | 71480200 | g/c | c | S |
| 7101553 | 59461 | 11 | 71480211 | t/c | c | Y |
| 7124000 | 59896 | 11 | 71480646 | c/t | t | Y |
| 12291664 | 60157 | 11 | 71480907 | g/a | g | R |
| 12291778 | 60369 | 11 | 71481119 | a/g | g | R |
| 12291781 | 60395 | 11 | 71481145 | a/g | g | R |
| 12291787 | 60424 | 11 | 71481174 | g/a | g | R |
| 12291788 | 60426 | 11 | 71481176 | g/a | g | R |
| 12291833 | 60456 | 11 | 71481206 | a/g | g | R |
| 10793016 | 60621 | 11 | 71481371 | g/a | g | R |
| 5792571 | 61207 | 11 | 71481957 | g/— | g | N |
| 12293529 | 61209 | 11 | 71481959 | g/c | g | S |
| 4338555 | 61254 | 11 | 71482004 | c/t | t | Y |
| 11235431 | 61854 | 11 | 71482604 | c/g | g | S |
| 6592458 | 63103 | 11 | 71483853 | a/g | g | R |
| 4945434 | 64645 | 11 | 71485395 | c/t | c | Y |
| 4945435 | 64777 | 11 | 71485527 | t/c | c | Y |
| 11307657 | 64980 | 11 | 71485730 | t/— | t | N |
| 5792573 | 64987 | 11 | 71485737 | t/— | t | N |
| 1894004 | 65375 | 11 | 71486125 | t/c | g | R |
| 12276164 | 65561 | 11 | 71486311 | a/g | g | R |
| 4378421 | 67554 | 11 | 71488304 | c/t | t | Y |
| 7116495 | 67643 | 11 | 71488393 | c/t | c | Y |
| 7101701 | 67713 | 11 | 71488463 | a/g | a | R |
| 10736786 | 68832 | 11 | 71489582 | t/c | c | Y |
| 11608165 | 70184 | 11 | 71490934 | t/g | t | K |
| 645603 | 70415 | 11 | 71491165 | g/a | a | R |
| 661290 | 71572 | 11 | 71492322 | a/g | a | R |
| 7122209 | 71732 | 11 | 71492482 | t/c | t | Y |
| 12417471 | 72829 | 11 | 71493579 | a/g | a | R |
| 541228 | 73154 | 11 | 71493904 | c/g | c | S |
| 12273666 | 73221 | 11 | 71493971 | a/g | a | R |
| 2511074 | 74343 | 11 | 71495093 | t/c | g | R |
| 3018311 | 74462 | 11 | 71495212 | t/g | g | K |
| 3018289 | 74471 | 11 | 71495221 | t/c | t | Y |
| 679926 | 75494 | 11 | 71496244 | a/g | c | Y |
| 567026 | 75510 | 11 | 71496260 | g/a | t | Y |
| 564294 | 75827 | 11 | 71496577 | g/a | t | Y |
| 678193 | 75831 | 11 | 71496581 | t/g | a | M |
| 677279 | 76027 | 11 | 71496777 | t/c | g | R |
| 560777 | 76160 | 11 | 71496910 | c/t | a | R |
| 676721 | 76196 | 11 | 71496946 | c/t | g | R |
| 7106529 | 76378 | 11 | 71497128 | a/t | a | W |
| 11602304 | 77306 | 11 | 71498056 | g/a | g | R |
| 585228 | 78847 | 11 | 71499597 | c/g | g | S |
| 578957 | 78918 | 11 | 71499668 | c/a | a | M |
| 7110215 | 79117 | 11 | 71499867 | a/g | g | R |
| 3133233 | 79811 | 11 | 71500561 | c/g | g | S |
| 3133230 | 79843 | 11 | 71500593 | t/c | c | Y |
| 12576024 | 80448 | 11 | 71501198 | g/t | g | K |
| 674319 | 80949 | 11 | 71501699 | c/t | t | Y |
| 675185 | 81130 | 11 | 71501880 | t/g | t | K |
| 5792574 | 81452 | 11 | 71502202 | —/c | a | N |
| 12275272 | 82595 | 11 | 71503345 | c/t | c | Y |
| 10400327 | 83633 | 11 | 71504383 | c/t | t | Y |
| 612255 | 84222 | 11 | 71504972 | c/t | a | R |
| 7101643 | 84378 | 11 | 71505128 | g/a | g | R |
| 575871 | 84380 | 11 | 71505130 | a/g | t | Y |
| 547208 | 85226 | 11 | 71505976 | c/t | a | R |
| 2511075 | 85815 | 11 | 71506565 | t/c | t | Y |
| 642573 | 86412 | 11 | 71507162 | c/g | g | S |
| 482197 | 86805 | 11 | 71507555 | g/a | a | R |
| 656640 | 87268 | 11 | 71508018 | t/c | t | Y |
| 671681 | 88370 | 11 | 71509120 | c/t | t | Y |
| 541022 | 88614 | 11 | 71509364 | a/g | g | R |
| 951586 | 89223 | 11 | 71509973 | a/g | c | Y |
| 2511076 | 89385 | 11 | 71510135 | g/a | a | R |
| 11235432 | 89500 | 11 | 71510250 | g/c | g | S |
| 3018308 | 89502 | 11 | 71510252 | t/c | t | Y |
| 11606798 | 89929 | 11 | 71510679 | g/c | g | S |
| 1791544 | 90515 | 11 | 71511265 | c/t | g | R |
| 3018304 | 90659 | 11 | 71511409 | c/a | t | K |
| 10751193 | 90914 | 11 | 71511664 | a/c | a | M |
| 4945470 | 91594 | 11 | 71512344 | c/t | t | Y |
| 3018291 | 91603 | 11 | 71512353 | a/c | a | M |
| 2511120 | 91769 | 11 | 71512519 | a/g | c | Y |
| 671132 | 92005 | 11 | 71512755 | g/a | c | Y |
| 4945475 | 93335 | 11 | 71514085 | g/c | g | S |
| 3018292 | 93443 | 11 | 71514193 | t/g | t | K |
| 642618 | 93751 | 11 | 71514501 | c/t | g | R |
| 552966 | 93775 | 11 | 71514525 | a/c | a | M |
| 6592459 | 94351 | 11 | 71515101 | t/g | g | K |
| 607446 | 94810 | 11 | 71515560 | c/t | g | R |
| 607070 | 94856 | 11 | 71515606 | a/g | c | Y |
| 10713307 | 95893 | 11 | 71516643 | c/— | c | N |
| 3018302 | 96500 | 11 | 71517250 | t/g | a | M |
| 3750909 | 97587 | 11 | 71518337 | g/c | g | S |
| 3018301 | 97629 | 11 | 71518379 | a/g | a | R |
| 2511114 | 97705 | 11 | 71518455 | c/t | t | Y |
| 12270166 | 97967 | 11 | 71518717 | a/g | g | R |
| 12270241 | 98126 | 11 | 71518876 | g/a | g | R |
| 11606587 | 98422 | 11 | 71519172 | a/g | a | R |
| 686340 | 98770 | 11 | 71519520 | g/c | c | S |
| 548961 | 99445 | 11 | 71520195 | g/a | g | R |
| 549032 | 99467 | 11 | 71520217 | c/a | a | M |
| 575831 | 100104 | 11 | 71520854 | a/g | a | R |
| 575878 | 100121 | 11 | 71520871 | a/t | t | W |
| 577435 | 100239 | 11 | 71520989 | t/c | c | Y |
| 579320 | 100512 | 11 | 71521262 | g/t | g | K |
| 495567 | 101046 | 11 | 71521796 | c/t | c | Y |
| 636946 | 101267 | 11 | 71522017 | c/t | t | Y |
| 493065 | 102487 | 11 | 71523237 | a/g | t | Y |
| 597513 | 102980 | 11 | 71523730 | a/t | t | W |
| 598835 | 103285 | 11 | 71524035 | t/c | c | Y |
| 10683614 | 103359 | 11 | 71524109 | —/tagt | t | N |
| 610004 | 103497 | 11 | 71524247 | t/c | c | Y |
| 610041 | 103526 | 11 | 71524276 | a/g | a | R |
| 673478 | 104662 | 11 | 71525412 | t/c | g | R |
| 670802 | 105226 | 11 | 71525976 | t/g | a | M |
| 505041 | 105950 | 11 | 71526700 | t/a | t | W |
| 2511116 | 107718 | 11 | 71528468 | c/t | g | R |
| 628025 | 107909 | 11 | 71528659 | a/c | a | M |
| 517837 | 107917 | 11 | 71528667 | c/t | a | R |
| 615000 | 108510 | 11 | 71529260 | t/g | a | M |
| 482013 | 109520 | 11 | 71530270 | c/t | g | R |
| 693391 | 109676 | 11 | 71530426 | t/g | c | M |
| 2511079 | 109712 | 11 | 71530462 | t/c | c | Y |
| 2250866 | 110071 | 11 | 71530821 | t/c | g | R |
| 2508860 | 110610 | 11 | 71531360 | a/g | c | Y |
| 7483267 | 110757 | 11 | 71531507 | a/g | g | R |
| 2511078 | 110758 | 11 | 71531508 | g/a | c | Y |
| 2508859 | 110923 | 11 | 71531673 | t/g | a | M |
| 2508858 | 110963 | 11 | 71531713 | c/g | c | S |
| 11235435 | 111245 | 11 | 71531995 | t/g | g | K |
| 11235436 | 111437 | 11 | 71532187 | a/g | g | R |
| 639435 | 112174 | 11 | 71532924 | a/c | t | K |
| 12285624 | 112646 | 11 | 71533396 | a/g | a | R |
| NUMA1-AD | 112784 | 11 | 71533534 | g/t | t | K |
| 624363 | 113275 | 11 | 71534025 | t/c | g | R |
| NUMA1-AE | 113614 | 11 | 71534364 | t/c | t | Y |
| 1053573 | 113965 | 11 | 71534715 | g/t | a | M |
| 1053511 | 114095 | 11 | 71534845 | c/t | g | R |
| 1063863 | 114125 | 11 | 71534875 | g/a | c | Y |
| 12137 | 114213 | 11 | 71534963 | c/t | c | Y |
| 4365081 | 114278 | 11 | 71535028 | a/g | g | R |
| 4466868 | 114321 | 11 | 71535071 | g/c | g | S |
| 3750911 | 114465 | 11 | 71535215 | a/g | g | R |
| 510925 | 115058 | 11 | 71535808 | t/c | c | Y |
| 595062 | 115193 | 11 | 71535943 | a/g | c | Y |
| 1053443 | 115433 | 11 | 71536183 | c/t | g | R |
| 542752 | 116202 | 11 | 71536952 | a/t | t | W |
| 3897579 | 116328 | 11 | 71537078 | t/c | g | R |
| 11235437 | 116812 | 11 | 71537562 | t/c | c | Y |
| 2508856 | 117201 | 11 | 71537951 | c/t | g | R |
| 5792575 | 117565 | 11 | 71538315 | a/— | a | N |
| 659513 | 117969 | 11 | 71538719 | g/a | g | R |
| 10898820 | 118150 | 11 | 71538900 | a/g | g | R |
| 2276397 | 127729 | 11 | 71548479 | c/t | a | R |
| 3750908 | 127959 | 11 | 71548709 | c/t | a | R |
| 3793938 | 128691 | 11 | 71549441 | c/t | g | R |
| 602285 | 129086 | 11 | 71549836 | c/g | g | S |
| 2276396 | 129463 | 11 | 71550213 | g/c | g | S |
| 2276395 | 129900 | 11 | 71550650 | t/c | g | R |
| 1806778 | 136610 | 11 | 71557360 | t/c | a | R |
| 4073394 | 137797 | 11 | 71558547 | a/g | a | R |
| 471547 | 151737 | 11 | 71572487 | g/t | g | K |
| 606136 | 152130 | 11 | 71572880 | a/g | c | Y |
| 605241 | 152332 | 11 | 71573082 | t/c | g | R |
| 686063 | 153789 | 11 | 71574539 | g/a | t | Y |
| 685749 | 153813 | 11 | 71574563 | t/c | g | R |
| 533207 | 153844 | 11 | 71574594 | a/c | a | M |
| 476753 | 188612 | 11 | 71609362 | a/g | g | R |
| NUMA1-AF | 191149 | 11 | 71611899 | g/t | g | K |

Assay for Verifving and Allelotyping SNPs

[0316] The methods used to verify and allelotype the proximal SNPs of Table 27 are the same methods described in Examples 1 and 2 herein. The PCR primers and extend primers used in these assays are provided in Table 28 and Table 29, respectively.

TABLE 28

| | | |
|---|---|---|
| dbSNP rs# | Forward PCR primer | Reverse PCR primer |

| | | |
|---|---|---|
| 4945392 | ACGTTGGATGGGCACACAGTAGGTGCTTAT | ACGTTGGATGCCACCAGCTTGTGAGGTAAT |
| 7938496 | ACGTTGGATGTGCAGTGAACTGCACTCCAG | ACGTTGGATGCTGGCCAGTAACTACTAGCT |
| 7926550 | ACGTTGGATGTTACTGAGTTTCCTAGGCTG | ACGTTGGATGGAATCCCAACACTTTGGGAG |
| 7945374 | ACGTTGGATGGAACACACACAGCTCTATTC | ACGTTGGATGCACATCCTTTTCACCGTGTC |
| 7949480 | ACGTTGGATGGGTTTCACCATATTGGCCAG | ACGTTGGATGCACGCCTATAATCCAAACAC |
| 7102523 | ACGTTGGATGAAACTGGATGTGTTCCTGGG | ACG1TGGATGGTAGACTCAGAGCTTAGGTG |
| 7121260 | ACGTTGGATGGCTACTGATCAAATTAAGTGG | ACGTTGGATGGCTGCATTTGCTTATGAACC |
| 7131230 | ACGTTGGATGAGACAATCTCAGAAAGAGGG | ACGTTGGATGATCCATAAGGAGGAAAGGGC |
| 7128317 | ACGTTGGATGAGACCAAGCTACAGTATCCC | ACGTTGGATGGGTAGCTGCAAGTCATTGTC |
| 2276385 | ACGTTGGATGAAGTGCGGGCAAACTATGAC | ACGTTGGATGTCCTCAAGAGGTGTTCATGG |
| 2276384 | ACGTTGGATGAGACAGCAGACTGGATTTGG | ACGTTGGATGACTACTCTGGGACACACAAG |
| 2276383 | ACGTTGGATGACTACTCTGGGACACACAAG | ACGTTGGATGTTTGGTCATAGTTTGCCCGC |
| 1892921 | ACGTTGGATGCCTGTTGCCCATGTAATGAG | ACGTTGGATGTACAAGAGGAGGAGGGAGTG |
| 1892920 | ACGTTGGATGAGTTTATCTGGGCAAAAACC | ACGTTGGATGAATGCCTGCTATGTGTCTAG |
| 7942626 | ACGTTGGATGGAAATATTTACTTGCGTTTCTC | ACGTTGGATGTGGACATCACGGAGAGATGC |
| 7124429 | ACGTTGGATGCTGGATCAAATTGAAAACAG | ACGTTGGATGGAAGGTAAAGCACAAGACAG |
| 7114081 | ACGTTGGATGTGGGCAGAGTTTCTGTTTGG | ACGTTGGATGGCATTAATTACATTTGCAGTG |
| 7125718 | ACGTTGGATGTCCCAAACAGAAACTCTGCC | ACGTTGGATGAGGCATGTTCACAGAGATGG |
| 1055452 | ACGTTGGATGATCATATCCCTCCCCAGTCC | ACGTTGGATGAAGACCTCCTGGGTGGGAAA |
| 3829215 | ACGTTGGATGTGGGTGGGAAAGACTCAAAG | ACGTTGGATGTCCATCATATCCCTCCCCAG |
| 1541306 | ACGTTGGATGCTGATTCTTCCAGTTGTCCC | ACGTTGGATGACCTTATCAGTGACTTGGCC |
| 3814722 | ACGTTGGATGATCCTGCTTCGTTCTTGCTG | ACGTTGGATGAAGTGGGAGGTCAAACATGG |
| 1939240 | ACGTTGGATGATTCCACCACTCCTAGGGAT | ACGTTGGATGTTAACCCCCATCGGAGACCT |
| 5743655 | ACGTTGGATGTGAGTGTGGTCCTCAGGAAG | ACGTTGGATGCAGACTGAGGTTGCTCTATG |
| 5743656 | ACGTTGGATGACTCAGGCTCGGCTTCTCTT | ACGTTGGATGACAGGTGGCATAAGCAGCAG |
| 5743657 | ACGTTGGATGTGTCAGGCTCAGGTGAGAAG | ACGTTGGATGGAGGTCAAGGGACTCAGAAC |
| 3814721 | ACGTTGGATGGACTGTCTCTCTCAGAAACC | ACGTTGGATGATTCCTCCCAAGAACACCAG |
| 5743658 | ACGTTGGATGCCTCCTTAGATTTAGCATCC | ACGTTGGATGTCACTGATGGGACAAATGGC |
| 5743659 | ACGTTGGATGTTGCCAGAGCCAGTGTTGAG | ACGTTGGATGAGGAACTGGCACACAAGCTC |
| 5743660 | ACGTTGGATGTTCAGGCTCAATGCCATACC | ACGTTGGATGTGGGAGATGTAGCCGACCTT |
| 5743661 | ACGTTGGATGTTCAGGCTCAATGCCATACC | ACGTTGGATGTGGGAGATGTAGCCGACCTT |
| 5743662 | ACGTTGGATGGACAACTTTCCTAGGCACTG | ACGTTGGATGAAAGGCCAGGATGTGGACGG |
| 2298455 | ACGTTGGATGTCCTACTCTCCAGAGGATAC | ACGTTGGATGAGTTCATACCCTAGGTGACC |
| 5743664 | ACGTTGGATGCCCATTGCTCCATTCTGTTC | ACGTTGGATGCATGAGACACAACTGGACAC |
| 5743665 | ACGTTGGATGGAATGGAGCAATGGGCTAAC | ACGTTGGATGGCCCAGGTTCTTAAAGCAAC |
| 5743667 | ACGTTGGATGTAAGGATGTAACTCCAGCCC | ACGTTGGATGGTTCAATAAAGGGCTAAGGG |
| 5743668 | ACGTTGGATGGAGGAAAGGACAGTTACAGG | ACGTTGGATGGGCTGGAGTTACATCCTTAC |
| 5743669 | ACGTTGGATGAGTAATGGTCACAGGACCTC | ACGTTGGATGTGCTCCTCTGAGATGGCCAG |
| 1573503 | ACGTTGGATGGATGACCTTTTCTAGTGCCC | ACGTTGGATGTCAGAGGAGCAGCAGCCATC |
| 5743670 | ACGTTGGATGTAGAGAACTGCTCTGCACAC | ACGTTGGATGCTCACATTCCCCGTGTTTAG |
| 5743671 | ACGTTGGATGCATGCATCTGGAACCTAGAG | ACGTTGGATGACTGCACTTCTGTAACGGAC |
| 1892919 | ACGTTGGATGTAGCTCTTCAGAAGAGCAGG | ACGTTGGATGGTTCTCTAGGTTCCAGATGC |
| 5743672 | ACGTTGGATGATGAAGGAACCATTGCCCAG | ACGTTGGATGATGGAACGCTGAGCTTATCC |
| 2735786 | ACGTTGGATGAGCACCAGGTGAGGGTCGCA | ACGTTGGATGAGGGAAGGAAAGGTCATGAG |
| 5743673 | ACGTTGGATGAGCACCAAGGCCTTGCACAG | ACGTTGGATGTCTCATGACCTTTCCTTCCC |
| 5743674 | ACGTTGGATGTGAGGAATGCTGGGCATTAG | ACGTTGGATGGAGCTCTGCTTCCATATGTG |
| 1062452 | ACGTTGGATGTGTCTACCTGGAGTGAACAG | ACGTTGGATGGACCCAAAGCAGAGAAGGAG |
| 5743675 | ACGTTGGATGGATAGGTGGAGAGAGAATGG | ACGTTGGATGCAAACTCCATTCCCACCTAC |
| 5743676 | ACGTTGGATGCATTCTCTCTCCACCTATCC | ACGTTGGATGAGTCTTGGTGGTTTCTGAGC |
| 760246 | ACGTTGGATGTTTAGTCCCGTCTTCCTCAC | ACGTTGGATGGATGACTTCACTGAAGAGGC |
| 11345794 | ACGTTGGATGCAGAAGCTGAAGACAACACC | ACGTTGGATGGAGCATTATGGGCTGTTCTC |
| 5743677 | ACGTTGGATGAACACAGGCGCTTGAAAAAG | ACGTTGGATGCTCTTCCCACTCTCCATTAG |
| 5743678 | ACGTTGGATGACTCAGCAGGAACAAGGTAG | ACGTTGGATGCTATTTTTCTCCCGTGAGTAC |
| 14537 | ACGTTGGATGTGGGAAGGTTTTTAAGGGCC | ACGTTGGATGAGTCAACTCAGTACTCACGG |
| 3168177 | ACGTTGGATGCCTTCCCATCACTCCAAATC | ACGTTGGATGACAGCCTTCAGCAGCAGCTC |
| 5743679 | ACGTTGGATGATGGGCCCTATGTCTCAGGA | ACGTTGGATGAAATCCCACCCCAGTGCAAG |
| 1541304 | ACGTTGGATGAAGGTAGGGTGTGAGCTGCTG | ACGTTGGATGAGGATGCTCTTTCCCAGGAC |
| 1053725 | ACGTTGGATGTAGCCTCTGGATCTAGAAGG | ACGTTGGATGTCCTGGACTTCAAGAGTGAG |
| 5743680 | ACGTTGGATGAACAGTAGCCAAACCCCTAG | ACGTTGGATGAGAAGGCGCCAGTGAAGGAC |
| 949324 | ACGTTGGATGTGAGAGAAGGCACTGAGAGG | ACGTTGGATGAAGCACTAAAGGGCCAGTAC |
| 949323 | ACGTTGGATGTGAGAGAAGGCACTGAGAGG | ACGTTGGATGAAGCACTAAAGGGCCAGTAC |
| 5743681 | ACGTTGGATGACAGCCAGCAACTGATAACC | ACGTTGGATGCTGGGAAGATCTCTTCCTGC |
| 5743682 | ACGTTGGATGACAGCCAGCAACTGATAACC | ACGTTGGATGCTGGGAAGATCTCTTCCTGC |
| 5743683 | ACGTTGGATGTCTCCAAGGAGAGAAGACAG | ACGTTGGATGTTATCAGTTGCTGGCTGTGC |
| 5743684 | ACGTTGGATGTTCTCCGCGCATTGCCACCA | ACGTTGGATGAGTGCCTCTACCTTGCCCTT |
| 5743685 | ACGTTGGATGCTAGCTTCTTGGGTGTGTTG | ACGTTGGATGTCTGACAGCCCTTCCTTGCA |
| 2845857 | ACGTTGGATGTACTAAACAGGTGAGGCTGG | ACGTTGGATGTTCCCAGGCCAGCGTGCTGT |
| 2852365 | ACGTTGGATGTTCCCAGGCCAGCGTGCTGT | ACGTTGGATGTACTAAACAGGTGAGGCTGG |
| 11538641 | ACGTTGGATGACTCCTGAGTCTAAGAAGGC | ACGTTGGATGTCAGTAGTGCTCTGTTTGCG |
| 11538639 | ACGTTGGATGACTCCTGAGTCTAAGAAGGC | ACGTTGGATGTCTGTTTGCGCCCTTCATGT |
| 11235417 | ACGTTGGATGGGTGGCCTTCTTAGACTATG | ACGTTGGATGAAGACACCTGGCTTCAGATG |
| 11538644 | ACGTTGGATGAGCAGCGCAAACGGGTCTC | ACGTTGGATGGGAAACAGCTGGTGGCCTTC |
| 11538643 | ACGTTGGATGCCATCACAGATGAGGAGATG | ACGTTGGATGCTATCTGGATTGGCTGCATG |
| 2845858 | ACGTTGGATGAAGGGTCCCGACCATAAGTG | ACGTTGGATGTAGCTGTATGGAGATGGAGG |
| 2155146 | ACGTTGGATGGATTCCTCTCTGAGCTCCTG | ACGTTGGATGTGTTTCCAGGTGGAACAGAC |
| 2852364 | ACGTTGGATGCTAGATCAGCAGGTGGGATT | ACGTTGGATGTGAAGACCTGCTATCCCCTG |
| 2845859 | ACGTTGGATGCCACCTACCCCATAAACTTG | ACGTTGGATGATAGTCTGTGTGCCGTACTC |
| 2845860 | ACGTTGGATGCCCGGTCCTTAATTTGTTCC | ACGTTGGATGCACGCAGAGACTGCTACTAC |
| 11538642 | ACGTTGGATGAGGCTAGCCTGGGAAGCAGGA | ACGTTGGATGGCTAGATGTGGAAGAGCCAG |
| 7949430 | ACGTTGGATGGTACACTGCAACAGATTCAC | ACGTTGGATGGCTGTAGAACGATGAGTTGG |
| 7938674 | ACGTTGGATGAAGGGAATGGGAAGCTTCTG | ACGTTGGATGCTAGCTTCTGGAAGACAGAG |
| 2735787 | ACGTTGGATGCAAACCTCCCCTTCAAGATG | ACGTTGGATGATTGTTGCTGCCCAGTGGAC |
| 11538640 | ACGTTGGATGAACCAGCCTCACCTATCTCC | ACGTTGGATGCAGGGATGGGAGTGAAGTAG |
| 10736784 | ACGTTGGATGATCCAATGTCGTCCTGCTTG | ACGTTGGATGAAGGACATGAGCATGGAGTG |
| 10736785 | ACGTTGGATGAAGGACATGAGCATGGAGTG | ACGTTGGATGATCCAATGTCGTCCTGCTTG |
| 11826059 | ACGTTGGATGAGGAACCTTGGAAGAATTTG | ACGTTGGATGGTCTTAACTTCTATACTAGC |
| 2503 | ACGTTGGATGACTAAGCTGAGATGTGAGGC | ACGTTGGATGCACCAAGGTTTCCTCAATGC |
| 2155145 | ACGTTGGATGGATATCTGGTATAATACCCG | ACGTTGGATGTCAGGCTGTATCCTAGTGAG |
| 4477459 | ACGTTGGATGAGAAGGCAAAGATAGGGCAG | ACGTTGGATGCGACTACAGTCTACTAAACC |
| NUMA1-AA | ACGTTGGATGAAGTTCCCCTGTCCTAAGAG | ACGTTGGATGAACCAATCCTCAGGGAACAC |
| 5019605 | ACGTTGGATGTAGGAGGAAGGGAACCAATC | ACGTTGGATGAAGAGAGCTCACATGCCAAG |
| 5019604 | ACGTTGGATGAAGTTCCCCTGTCCTAAGAG | ACGTTGGATGAACCAATCCTCAGGGAACAC |
| 5019603 | ACGTTGGATGAACCAATCCTCAGGGAACAC | ACGTTGGATGAAGTTCCCCTGTCCTAAGAG |
| 3793941 | ACGTTGGATGAAGGTGACACAGTTGAAAGC | ACGTTGGATGTCTAGATAGTCTGGGCAGGG |
| 11235418 | ACGTTGGATGTCTAAGCCACAGGCTTCCTA | ACGTTGGATGGCTATTCTCTAAGCTCTGGG |
| 3793940 | ACGTTGGATGTCTCTCTTTTCCCCTACTCC | ACGTTGGATGGCAGCACATGTACTCCAAAG |
| 2032353 | ACGTTGGATGTAGAGCCCCAGAAAGTGATG | ACGTTGGATGCTTGAAGGTGATATGCGAGG |
| 3934448 | ACGTTGGATGTAGAGCCCCAGAAAGTGATG | ACGTTGGATGCTTGAAGGTGATATGCGAGG |
| 7951267 | ACGTTGGATGATTGGTTCAGGGTGGGAAAG | ACGTTGGATGACCCTTCTGCACCTTCTCTC |
| 1053603 | ACGTTGGATGGTCTCAGCATCAGCACGTAC | ACGTTGGATGGTTTCTGGAAGTGGAGTTGG |
| 1053602 | ACGTTGGATGTGGCAGGACAGAGCCAACAG | ACGTTGGATGTGCTGCTTCTGGCATTGCTG |
| 11235419 | ACGTTGGATGAGGCAGCGCTGCAGGCTATG | ACGTTGGATGGCCCGCAGCCGTTCCAGCT |
| 1053601 | ACGTTGGATGCACAGCGAGCTCCAGATAAG | ACGTTGGATGACTTCCTTCTCTTGGACCTG |
| 3750913 | ACGTTGGATGCACACTCACTCTCAGCTGTG | ACGTTGGATGCCATCAGGCTGAGACTGAAG |
| 3750912 | ACGTTGGATGCTCGATTACAGCAGCTTGGG | ACGTTGGATGTCACTCTCAGCTGTGTGCTGG |
| 1053600 | ACGTTGGATGAAGGAGCTGGAAGAAGAGAG | ACGTTGGATGACTTCAGTCTCAGCCTGATG |
| 1057992 | ACGTTGGATGGAACACCAGGAACCCAAATG | ACGTTGGATGTTGCAGGTAGGAATGCACAG |
| 2298789 | ACGTTGGATGCAAGACTTATCTGAGGAAGG | ACGTTGGATGAACCTGCTTACTACTTCCCC |
| 10898813 | ACGTTGGATGGCACCTACAATAGGCTATGC | ACGTTGGATGTAGAGCGAGACTCTGTCTCA |
| 11278712 | ACGTTGGATGGGCAAGTGAGAATCCCCATC | ACGTTGGATGATAATTGGAGGCATCCAGCC |
| NUMA1-AB | ACGTTGGATGGGGAAGCAGTGAGAAGAGAG | ACGTTGGATGAGCTCTCCCTGCATTCCTTC |
| 949325 | ACGTTGGATGTGTCCCCATCTTCTCTTTCC | ACGTTGGATGCAGAACTATGTGCACAAGGG |
| NUMA1-AC | ACGTTGGATGTAGTGCGCACTTCCATAGAC | ACGTTGGATGCATATGCATTGGTAAGCGCC |
| 949326 | ACGTTGGATGCCCTCAAAAGCTGTTCCCTG | ACGTTGGATGCTGCAGAGATGTGCTAAGAG |
| 2298456 | ACGTTGGATGGTTCTCAAATTGCATAAAGG | ACGTTGGATGTAGAAGGCACAGGAGCTGGG |
| 7949845 | ACGTTGGATGTCACCTGATGTCAGGAGTTC | ACGTTGGATGCCACCACACCTGGCTAATTT |
| 7949989 | ACGTTGGATGAAATTAGCCAGGTGTGGTGG | ACGTTGGATGAATCTCCACTTCCCGTGTTC |
| 1573500 | ACGTTGGATGCTATAACCTCCAACTCCTGG | ACGTTGGATGAAAAATGAGCTGGGTGTGGC |
| 4945411 | ACGTTGGATGGAGGAAAGGATGAGATAAATG | ACGTTGGATGCTCTGTTCCTATATGTGTTTC |
| 3831387 | ACGTTGGATGATGAAGTGAAAGTTCTGTGG | ACGTTGGATGCGTAGAAATTATTCTCTGTTCC |
| 11235422 | ACGTTGGATGTCTAGAAGCCAAACAGGAGG | ACGTTGGATGAAGAGTCACCGGAATAGCTC |
| 10128658 | ACGTTGGATGTCTAGAAGCCAAACAGGAGG | ACGTTGGATGAAGAGTCACCGGAATAGCTC |
| 2298457 | ACGTTGGATGTGGTTTCCAGGAAGTTCACC | ACGTTGGATGTGTGCAGATACCAGGCATTC |
| 3838779 | ACGTTGGATGCTGTTTCCCCGAACTTCAAG | ACGTTGGATGCTTGCAAGGGAAAGAGACTC |
| 1573501 | ACGTTGGATGTAGCTTCCCGTTCATCTGTG | ACGTTGGATGCTGCCACCCTATTTGCAAAC |
| 11235424 | ACGTTGGATGCTGCCACCCTATTTGCAAAC | ACGTTGGATGTTGAGCCATTCCAGATGGTG |
| 10898814 | ACGTTGGATGTGGAACTGCAGTTAGCTAGG | ACGTTGGATGAATACTAGTCCCTGGGATCC |
| 7930142 | ACGTTGGATGACATTTCACCTGAGAACCTC | ACGTTGGATGATGTTGTGACTCCTTGGCTC |
| 7930544 | ACGTTGGATGGCAGCACTCATGAATGCAAC | ACGTTGGATGGCACCTACTTTATTCCTGGC |
| 7930721 | ACGTTGGATGTAGTGGAGGCATTTTGCCAG | ACGTTGGATGGAGGGATGCTTTTTACTGAG |
| 7930722 | ACGTTGGATGGAGGGATGCTTTTTACTGAG | ACGTTGGATGTAGTGGAGGCATTTTGCCAG |
| 6592456 | ACGTTGGATGAAGGGAAACTTGTCAGAGGG | ACGTTGGATGATAAGCTGTGGGAGTTGAGG |
| 11235425 | ACGTTGGATGCTTGGAGGTAGGCGATATTG | ACGTTGGATGAAGGAAGCTGGTCTGCATTG |
| 6592457 | ACGTTGGATGGTGTGTTGTCCTTGGGTTAG | ACGTTGGATGGCATCTTGAATTTTTGGCCC |
| 10898815 | ACGTTGGATGTGAGTCCCTGATACCAGTTC | ACGTTGGATGAGGCCAAGGATAGACTGAAG |
| 11235426 | ACGTTGGATGTTAGATTGTTTGCCCCAGGC | ACGTTGGATGTGATACCAGTTCCTAACTGC |
| 10898816 | ACGTTGGATGTTCAGTCTATCCTTGGCCTG | ACGTTGGATGCCAAGCATAGGTCAGTTGTC |
| 1939247 | ACGTTGGATGAAAGGAAGGGCTCTCTGATG | ACGTTGGATGTAATTTCAGGAAGGAGTGCC |
| 1939246 | ACGTTGGATGCACAGTGCAGGGACACTATC | ACGTTGGATGATAAGAGGCTGAGGTAGGTG |
| 1939245 | ACGTTGGATGTGCGCCTGGCCTAAAAGTTG | ACGTTGGATGTCAATGATTTCTCTACAGAC |
| 1939244 | ACGTTGGATGAACAACTTTTAGGCCAGGCG | ACGTTGGATGTCAAGCAGTCCTTCCACCTC |
| 1939243 | ACGTTGGATGCTCAAGCGATCTTCCCACGT | ACGTTGGATGTTTTTAGCTGGGTGAGGTGG |
| 4245463 | ACGTTGGATGTGAAGCTGCAACTGCATTCC | ACGTTGGATGCTGTTTTAACTGGGATTCATC |
| 4944258 | ACGTTGGATGGTCTCTTCATTTTCTGCAGG | ACGTTGGATGTTGGTCAGGACAGGTCATTG |
| 7926751 | ACGTTGGATGCTGATCCCAGCACATATAAC | ACGTTGGATGATAGAGTGAAAGCCTGTGTC |
| 12282917 | ACGTTGGATGTCAGAAGTTTGCAACCACCC | ACGTTGGATGCCACCACACCCAGCTAATTT |
| 12282918 | ACGTTGGATGTCAGAAGTTTGCAACCACCC | ACGTTGGATGCCACCACACCCAGCTAATTT |
| 7937582 | ACGTTGGATGGAGCTCAGAAGTTTGCAACC | ACGTTGGATGCCACACCCAGCTAATTTTTG |
| 10898817 | ACGTTGGATGTCTCTGACCCAGGGCAAGTT | ACGTTGGATGTTGCAGTGAGCCGAGATCAC |
| 7480015 | ACGTTGGATGTAATCCCAGCACTTTGGGAG | ACGTTGGATGACAGGTTTTTGCCATGTTGC |
| 7123992 | ACGTTGGATGGACCAAAGTCCCTGCATATG | ACGTTGGATGCAGAGCAAGACTCGGTCTAA |
| 1573502 | ACGTTGGATGTGCTGATTTAATGTGACCAG | ACGTTGGATGCATTTTTGCAGATAAAGAAA |
| 7127865 | ACGTTGGATGAGGTGGCAGAATCTCAATGG | ACGTTGGATGGGAGATCCCATGGGACATTT |
| 4945426 | ACGTTGGATGACACCATTCTTGCCCAGAAG | ACGTTGGATGTGGATAGGAAGGACCAAGAG |
| 11235428 | ACGTTGGATGAGAAACCCCAGTTGAGTGTC | ACGTTGGATGGCTGACAAGACTAAAGCTCG |
| 7122489 | ACGTTGGATGTCTCAGCAGATCCTTCTGTG | ACGTTGGATGAGTACACTGGGTGATGCTGA |
| 1894003 | ACGTTGGATGGCCTAGCCATGATTTCCTAC | ACGTTGGATGTTGACCCTCTGGTCCTGC |
| 1548348 | ACGTTGGATGTCGGTGTTTGCTTGCATGTG | ACGTTGGATGGTGAAAACCCTGATCTTGGG |
| 1892923 | ACGTTGGATGTGCAGCCATGTATTGTACTG | ACGTTGGATGTGTGTGAATATAGTGGTGGG |
| 5792570 | ACGTTGGATGGAAAGCAACCCTTTGCTCTG | ACGTTGGATGATACTCAGAAACAGGCGCTG |
| 7115200 | ACGTTGGATGTTGGTTTTCTTCTCAGTCTG | ACGTTGGATGAAAGAAAGCAGACTCCTGGC |
| 4945430 | ACGTTGGATGCAGCCATGTAGGAGAAGCAG | ACGTTGGATGCTGCAGCCCTTAACAGACG |
| 11235429 | ACGTTGGATGACTCTGCTTCTCCTACATGG | ACGTTGGATGGAAGTTCGCTATTCAGTGGG |
| 1939242 | ACGTTGGATGCTCCTCTCTGCTTTCTCTTC | ACGTTGGATGCCTTGAAACACACAGGTAGC |
| 9666346 | ACGTTGGATGAAGTGCTGGGATTACAGGTG | ACGTTGGATGTAATGAGGGCACACAAGAGG |
| 7101553 | ACGTTGGATGAAGTGCTGGGATTACAGGTG | ACGTTGGATGTAATGAGGGCACACAAGAGG |
| 7124000 | ACGTTGGATGTAATCCCAGCACTTTGAGAG | ACGTTGGATGAGAACTCCGCCTGGCTAATT |
| 12291664 | ACGTTGGATGGCTGTGCCTAGGCAACATAG | ACGTTGGATGTACAGGTGTGTGCCACCATG |
| 12291778 | ACGTTGGATGGTCACAATCATTGGCTACAG | ACGTTGGATGGGGACTCTGACACTAAAAAAG |
| 12291781 | ACGTTGGATGGTCACAATCATTGGCTACAG | ACGTTGGATGGGGACTCTGACACTAAAAAAG |
| 12291787 | ACGTTGGATGAAGGAATTCTCCCACCCTAG | ACGTTGGATGGTCACAATCATTGGCTACAG |
| 12291788 | ACGTTGGATGAAGGAATTCTCCCACCCTAG | ACGTTGGATGGTCACAATCATTGGCTACAG |
| 12291833 | ACGTTGGATGTTTAGTGTCAGAGTCCCAGC | ACGTTGGATGGGCATGATCTCTGCTCATTC |
| 10793016 | ACGTTGGATGGGTACCTACTTCATTAAGGG | ACGTTGGATGAGCTAATGCTTACTGAGTGC |
| 5792571 | ACGTTGGATGCCTACAATCTAACTCCTCCC | ACGTTGGATGCATCAGTCTGCCTCTCTAGA |
| 12293529 | ACGTTGGATGTCCCTACAATCTAACTCCTC | ACGTTGGATGTTTACTTTAGGGTCCAGCTC |
| 4338555 | ACGTTGGATGGGAGGAGTTAGATTGTAGGG | ACGTTGGATGAGGGCAAGACTCCATCTCAA |
| 11235431 | ACGTTGGATGTCTGGCCACCAGAGAATGAC | ACGTTGGATGTACAGCAATGAGCCTTGGTC |
| 6592458 | ACGTTGGATGGGAGAATTGCTTGAATCCTGG | ACGTTGGATGTTGTTACCCAGGGTGTAGTG |
| 4945434 | ACGTTGGATGGAAGAAATCTGAGGCTCAGG | ACGTTGGATGATAGGGACAAGGTAGACAAC |
| 4945435 | ACGTTGGATGAAGAATCACATGAACCCGGG | ACGTTGGATGTTCAAGATGGAGTCTCGCTC |
| 11307657 | ACGTTGGATGGCCGTGTGCTTTTCCTCATG | ACGTTGGATGTGAGGTCGTGCCATTGTACT |
| 5792573 | ACGTTGGATGGCCGTGTGCTTTTCCTCATG | ACGTTGGATGTGAGGTCGTGCCATTGTACT |
| 1894004 | ACGTTGGATGTGAGGATCCGAGAGCTTTAC | ACGTTGGATGCATCCCTCCTAGTACAAGAC |
| 12276164 | ACGTTGGATGTTACCATGGCCTCATTGTCC | ACGTTGGATGGAAGCCTCAGACTTACCAAC |
| 4378421 | ACGTTGGATGTTTTTGAGACAGGGTCTTGC | ACGTTGGATGAGAAGTTTGAGGTTGCAGCG |
| 7116495 | ACGTTGGATGCAAGTAGCTGCTGCTACAAC | ACGTTGGATGTAGCGAGACTTCATCGCTAC |
| 7101701 | ACGTTGGATGATGAAGTCTCGCTATGTTGC | ACGTTGGATGACACTTTGGGAGGTCAATGC |
| 10736786 | ACGTTGGATGCGCTCCTTTAAACCAGTACC | ACGTTGGATGTGGGGAGCTAAAGAGAACAC |
| 11608165 | ACGTTGGATGTTGGAGACTTGTTCCCTCTG | ACGTTGGATGTTGCACTGCATTCTGTAAAG |
| 645603 | ACGTTGGATGTACATCTTCAGTACAGATGC | ACGTTGGATGCCACATGTGTGGATTCAACC |
| 661290 | ACGTTGGATGGTCTCTGCCTTGCATAGATC | ACGTTGGATGAACAGGAATCCCCAGAGATC |
| 7122209 | ACGTTGGATGAGCTGTGGAATCTCAAGCAG | ACGTTGGATGGAAAGACAGTGACACCAATG |
| 12417471 | ACGTTGGATGCTGAAGTCTCAGCTACTCAG | ACGTTGGATGAATCGTAGCTCACTGAAGCC |
| 541228 | ACGTTGGATGTAATCCCAGCACTTTGGGAG | ACGTTGGATGTTTTACTATGTTGGCCAGGC |
| 12273666 | ACGTTGGATGATTACTGGCATGAGCCATCG | ACGTTGGATGGATTATCAGTTTGGCTTGCC |
| 2511074 | ACGTTGGATGTCCAGCCTAAGAAACAGAGC | ACGTTGGATGACCGCACCCAGCTTAGTTTT |
| 3018311 | ACGTTGGATGAAAACAAACTAAGCTGGGTG | ACGTTGGATGAGAGACAGGGTTTCACTATG |
| 3018289 | ACGTTGGATGAGAGACAGGGTTTCACTATG | ACGTTGGATGAAAACAAACTAAGCTGGGTG |
| 679926 | ACGTTGGATGACTTGCCAGGATTAGGAGTG | ACGTTGGATGAGCTGCTTCCAACTCAACTG |
| 567026 | ACGTTGGATGATGTGAGCACAGCTAGCTAC | ACGTTGGATGTTGTTTGGAGAGCTCCTGGG |
| 564294 | ACGTTGGATGATATGTTCTGCAACTTGCCC | ACGTTGGATGTGCTGGTATGGAAACATGTC |
| 678193 | ACGTTGGATGTGCTGGTATGGAAACATGTC | ACGTTGGATGATATGTTCTGCAACTTGCCC |
| 677279 | ACGTTGGATGCTCCTGGTAGCTGGGACTAA | ACGTTGGATGGAACAGTTTGGGCAACATGG |
| 560777 | ACGTTGGATGGTGGCACATTCTTACATAGG | ACGTTGGATGCAAAGTGCTGGGATTACAGG |
| 676721 | ACGTTGGATGTCCAGATGTAGCAAAATGGG | ACGTTGGATGTGGCTGGCAATTCCTTAAAC |
| 7106529 | ACGTTGGATGATTTGGGAATATCTGTTGAC | ACGTTGGATGCAAGCTAATATTTCTCTAGG |
| 11602304 | ACGTTGGATGATTGCAGGTATGAGCCACTG | ACGTTGGATGCAGAGTGAGACTCCATGTCG |
| 585228 | ACGTTGGATGATTTGGGAGAGAATGCGAGG | ACGTTGGATGGTGGAGGAACTCAGTGTAAC |
| 578957 | ACGTTGGATGTCTTTTTAATTTCTCCTCGC | ACGTTGGATGTTCGTGGAGAGTATGATAGC |
| 7110215 | ACGTTGGATGGCTATCATACTCTCCACGAA | ACGTTGGATGGGTTTCACCATGTTGGCCAG |
| 3133233 | ACGTTGGATGAGGTGAAAGGATTGCTTGAG | ACGTTGGATGCACCACCATGCCTAGCTAAT |
| 3133230 | ACGTTGGATGTCAAGTGATCCTCTCACATC | ACGTTGGATGCAACATAGTGAGACCTCATC |
| 12576024 | ACGTTGGATGCAGCTTATTATGGCTTCAGC | ACGTTGGATGTATAGTCCCAGCTACTCAGG |
| 674319 | ACGTTGGATGAAATAGCTGGGCATGATGGC | ACGTTGGATGATCTTCCCGCTTTAGCTTCC |
| 675185 | ACGTTGGATGAATGACATGGGGAAATACTC | ACGTTGGATGCACCCAGCCTATATCCTGC |
| 5792574 | ACGTTGGATGTTCAAAAATGGGGCCATACC | ACGTTGGATGAGAGTGAGACCCTGTCTCAA |
| 12275272 | ACGTTGGATGGTACTGTAAGAACCAGGACC | ACGTTGGATGGCCCGGTCTTGTCTATTCTT |
| 10400327 | ACGTTGGATGCTGCCACTTTAAGAGGACTG | ACGTTGGATGTCTTCTTTCCCTCATTGCCC |
| 612255 | ACGTTGGATGGTTTGACTACTGGACTTGGG | ACGTTGGATGTCTGATCACCCAGCTGTGAC |
| 7101643 | ACGTTGGATGGATTCTGTGACTAAGTTACTG | ACGTTGGATGTAGCATCTCTTAACTCTTTC |
| 575871 | ACGTTGGATGAGCCTGGTCAAAAGATTCTG | ACGTTGGATGTAGCATCTCTTAACTCTTTC |
| 547208 | ACGTTGGATGGATAATGGAGAAAACTGGCC | ACGTTGGATGAGTCTGGGTGACAGAGAGAG |
| 2511075 | ACGTTGGATGTTGAAGATTTCTTCCAGGGC | ACGTTGGATGGGGCAAGACATGTACAATATC |
| 642573 | ACGTTGGATGAGATCCTGCTCAGGACAAAG | ACGTTGGATGTCCACCAGGAGGTAAGTCAA |
| 482197 | ACGTTGGATGGAAAATGAGAGTGGTGTGGG | ACGTTGGATGCTGCCCTGTTAGGATTTCAG |
| 656640 | ACGTTGGATGTGGGACCCAGGCACACTCCA | ACGTTGGATGCTTGAGCTCAGGAGTTCCAG |
| 671681 | ACGTTGGATGGAAATACTTGCTGAAATAGGG | ACGTTGGATGACATTTTGCCAAATTTGCTG |
| 541022 | ACGTTGGATGACTACCTAAGGAAACTGGGC | ACGTTGGATGCTACTATACCCCTCATGAGC |
| 951586 | ACGTTGGATGAACCAAGGTAAAGGGTTGGC | ACGTTGGATGCTACAGCCATCAGATACCTC |
| 2511076 | ACGTTGGATGCAAAGTGCTGGGATTACAGG | ACGTTGGATGTTTCTAGACAGCTCCTCCTC |
| 1123543 | ACGTTGGATGAGTAGCTGGGACTACAGGCA | ACGTTGGATGAGGAGATAGAGACCACGGTG |
| 3018308 | ACGTTGGATGAGTAGCTGGGACTACAGGCA | ACGTTGGATGAGGAGATAGAGACCACGGTG |
| 11606798 | ACGTTGGATGATAATGGCCTCTCCTCTACC | ACGTTGGATGAGCGAGACCCTGTCTCAAAA |
| 1791544 | ACGTTGGATGATTACAGGCCTGATCCACC | ACGTTGGATGTAGAACTTAGCTCACAGAGC |
| 3018304 | ACGTTGGATGCCTCCTGGGTTCAAGCGATT | ACGTTGGATGAGACCAGACTGGCCAACATG |
| 10751193 | ACGTTGGATGTCTCTCTATCACCCAGACTG | ACGTTGGATGTTGAACCTGGGAGGTGGAAG |
| 4945470 | ACGTTGGATGAATCACTTGAGCCCGAGAGG | ACGTTGGATGATGGAGTCTCACTCTGTCG |
| 3018291 | ACGTTGGATGAGATGGAGTCTCACTCTGTC | ACGTTGGATGACAGGAGAATCACTTGAGCC |
| 2511120 | ACGTTGGATGGGTAGATTTGGAGCTGAGAG | ACGTTGGATGATATGCCTAGAAGTGCTCAG |
| 671132 | ACGTTGGATGAACAGAAGTTGGTTCTTCCC | ACGTTGGATGGCCTTACTTAGCTGATGCTG |
| 4945475 | ACGTTGGATGTTATTCTCCAGGCTGGAGTC | ACGTTGGATGAGGCAGGAGAATCGCTTGAA |
| 3018292 | ACGTTGGATGAGCATGAGAAATCTTTTGGG | ACGTTGGATGCTACACCTGTAAACAGCAGC |
| 642618 | ACGTTGGATGTCTCAGATCTCATGCGTAAC | ACGTTGGATGCCAGAAGTTAACACAGAAAG |
| 552966 | ACGTTGGATGCCCAATCATTACCTCTTTACC | ACGTTGGATGATGTAGACGACAGAATGAGG |
| 6592459 | ACGTTGGATGGGAGAATGGTGTGAACCTGG | ACGTTGGATGAGATGGAGTCTCACTCTGTT |
| 607446 | ACGTTGGATGGATCATTCCCAAAGTCAATCC | ACGTTGGATGCATGCCCAGCTACAAAATAAT |
| 607070 | ACGTTGGATGCATACCAAAAGGTGTTGTCC | ACGTTGGATGAGAGATGGATTGACTTTGGG |
| 10713307 | ACGTTGGATGTAAAATACCAGATGGCAGGC | ACGTTGGATGAACTCTTGACCTCGTGATCC |
| 3018302 | ACGTTGGATGTTTGGGTTTATGGGTTGGGC | ACGTTGGATGACTGACCAGTCCAAGACAAC |
| 3750909 | ACGTTGGATGGTTGTATCTTGTTCGCCGTG | ACGTTGGATGGCACTCACAGAACGACTAAG |
| 3018301 | ACGTTGGATGACTAAGAACCTTCCTGCTCG | ACGTTGGATGTCTGTCCCATGTGAGTGTTG |
| 2511114 | ACGTTGGATGAACACTCACATGGGACAGAC | ACGTTGGATGGGGTGGTTCTTAAGCATCCC |
| 12270166 | ACGTTGGATGTGAGGTAGAAGGATCGCTTG | ACGTTGGATGTGGAGTGTAGTTGCGTGATC |
| 12270241 | ACGTTGGATGTTCTGAGGGCGTTTCTGATC | ACGTTGGATGCCCCAACGCAAACATAAAGC |
| 11606587 | ACGTTGGATGCGCTACTCAAAGCTCTACAG | ACGTTGGATGGAAAGCACTGGGTAGGTTAC |
| 686340 | ACGTTGGATGGTCTCATTGTCTTAGTCTCTC | ACGTTGGATGGCTGGAATGAATTTCAGATCC |
| 548961 | ACGTTGGATGAAAAAAAAATTGGGGGTGGG | ACGTTGGATGTATTTGCGCACTGCAACCAG |
| 549032 | ACGTTGGATGTACTGTTCACTCTCTACCCC | ACGTTGGATGCAAGAGCGAAACTCTGTCTC |
| 575831 | ACGTTGGATGATTACAGCAACCTCATGGCC | ACGTTGGATGATAGTGCCGGCAAGTAGTAG |
| 575878 | ACGTTGGATGATAGTGCCGGCAAGTAGTAG | ACGTTGGATGATTACAGCAACCTCATGGCC |
| 577435 | ACGTTGGATGGATTGCCATGGTAGCACTCG | ACGTTGGATGCCCTGCTGGTGTTTATGGAC |
| 579320 | ACGTTGGATGAAGATTCAACCTGGCTCCTG | ACGTTGGATGTGCATTTGGCTAGACTGCAG |
| 495567 | ACGTTGGATGTTCTGTCAACTTGGGATTGG | ACGTTGGATGATTGTTGTAGACTATTACCC |
| 636946 | ACGTTGGATGAGACCAGCCTAAGCAACATG | ACGTTGGATGTTAGCTTCCTGAGTAGCTGG |
| 493065 | ACGTTGGATGTGATCAGCTGGAGGGTTATG | ACGTTGGATGATGGCTTCAGCTGGTATCTC |
| 597513 | ACGTTGGATGCATTTCTTCTGGTCAGGCAC | ACGTTGGATGAGTCCACACCTTGTTCACAG |
| 598835 | ACGTTGGATGTTTTGTGTAGCACCAGCTCC | ACGTTGGATGTTTAACCAGCTTCTTGGGGC |
| 10683614 | ACGTTGGATGTTAGGAACTGCACTGGGTTG | ACGTTGGATGTTGGTACCCCAGAGTTATGC |
| 610004 | ACGTTGGATGAGAAGCTCATCCCACTTCAG | ACGTTGGATGGGTACCAACCCAGTATTTAC |
| 610041 | ACGTTGGATGCTGTTGTAGGTGCTGAAGTG | ACGTTGGATGCTGGCTGTCTACTACAGAAC |
| 673478 | ACGTTGGATGTAATACAAAGGTGGCAGCAG | ACGTTGGATGTTGACAAGGATAAGGACAAG |
| 670802 | ACGTTGGATGGAGACTGTCTTGATACCCAC | ACGTTGGATGCAGGCCCTCAAGGATTTGTT |
| 505041 | ACGTTGGATGATAGCCCCCTGTTTCCTTTC | ACGTTGGATGGGAGAGTGAGAGGTTTTTTTC |
| 2511116 | ACGTTGGATGGGGACAGAGTTGCCTAAAAC | ACGTTGGATGCTGTGGCAGCCTGGATATAC |
| 628025 | ACGTTGGATGTTCCTAATCCTGCTTCCCTC | ACGTTGGATGCTGCTACCTTATCACATGGG |
| 517837 | ACGTTGGATGGAATTCCTAATCCTGCTTCC | ACGTTGGATGCTGTGTCATTCTGTTTCAGG |
| 615000 | ACGTTGGATGTGCTTCAGTGGAATGGCAAG | ACGTTGGATGAAACCAGCCTCCATTCACTC |
| 482013 | ACGTTGGATGGCCTTGGAGGAGCTTATATG | ACGTTGGATGCTCTTCTGTGCTGCTACAAC |
| 693391 | ACGTTGGATGCACTTTGATATCCTGTCTCTC | ACGTTGGATGATCACTGTATATCCAGTACC |
| 2511079 | ACGTTGGATGAGCTGAGTAGATGATAGCAC | ACGTTGGATGGGAAAGAGAGACAGGATATC |
| 2250866 | ACGTTGGATGCCCCCTAAAGCCAAAAAAGC | ACGTTGGATGTCCTTGGCTCCTCATTTACC |
| 2508860 | ACGTTGGATGAAGTGCTGGGATTACAGGCG | ACGTTGGATGCTCCCTGTCGGAAAAATGGG |
| 7483267 | ACGTTGGATGGAAACCCCGCCTCTACTAAA | ACGTTGGATGAAGTGATTCTCCTGCCTCAG |
| 2511078 | ACGTTGGATGGAAACCCCGCCTCTACTAAA | ACGTTGGATGAAGTGATTCTCCTGCCTCAG |
| 2508859 | ACGTTGGATGAGCCTCTGATGTACCAGTTG | ACGTTGGATGTGGCAACAGAGTGAGACTCC |
| 2508858 | ACGTTGGATGTACCTCTTCCACAGGAGAAC | ACGTTGGATGACAACTGGTACATCAGAGGC |
| 11235435 | ACGTTGGATGAGCATGATGCTCTGTCTTCC | ACGTTGGATGCCCTTCACTGAAGACCTTTC |
| 11235436 | ACGTTGGATGGTCATACAGTATGGCTGTGG | ACGTTGGATGTGGGCAGAGAAGGAAGAATG |
| 639435 | ACGTTGGATGGACCCTAGTAGTCCTAAAGG | ACGTTGGATGCTTCTCATCTGCTCAACAGC |
| 12285624 | ACGTTGGATGTTTTTGAGACGGAGTCTCGC | ACGTTGGATGTGAACCTGGAAGGCGGAGTTT |
| NUMA1-AD | ACGTTGGATGCCTGGCTAACATGGTGAAAC | ACGTTGGATGGGACTATAGGCACCTACTAC |
| 624363 | ACGTTGGATGTTATCTAACTCTCTGGGCCC | ACGTTGGATGCCTGGTACTCTGTGAAGAGT |
| NUMA1-AE | ACGTTGGATGAGGCAGCTTTGATTCTTGGG | ACGTTGGATGTGGTCTGCTTTCTCTCTCCA |
| 1053573 | ACGTTGGATGTATCGAGGGTGACAAACCAA | ACGTTGGATGGTCTGGATGAGCTTGAATTTG |
| 1053511 | ACGTTGGATGGACCTAGGGAGATCCCCTTC | ACGTTGGATGTGAGCACCAAGTCAGGGAGA |
| 1063863 | ACGTTGGATGTGAGGCCAACAGAGAGGGTG | ACGTTGGATGTGGAGATACCAGTTTGGGTG |
| 12137 | ACGTTGGATGTGAAGACATACCAGGCTCTG | ACGTTGGATGGGTAGAACC1TTTGGGACTG |
| 4365081 | ACGTTGGATGTTCTACCCTCACTTGCTCAG | ACGTTGGATGACAGTACCCTAACCTGCTAC |
| 4466868 | ACGTTGGATGACTGCGGCTTATACAGTACC | ACGTTGGATGTTCTAGCCTTCCTCTTCTCC |
| 3750911 | ACGTTGGATGGGATCCCAAACTGTACAACC | ACGTTGGATGGGATAGCTGCTTATGCCTAC |
| 510925 | ACGTTGGATGGATGAGGCTTACCTGGGCTG | ACGTTGGATGGGGTGCTGACCAAGAGAGAG |
| 595062 | ACGTTGGATGTCATGTCAGCCCTGTTTACC | ACGTTGGATGAGACTCAATCTAGGCCCATC |
| 1053443 | ACGTTGGATGTCTCTTCCATCCTTGCCAAG | ACGTTGGATGTGTACTCATGCTGCTCCATG |
| 542752 | ACGTTGGATGCCTTTAGATCCCAGTGCTTG | ACGTTGGATGCTAGGACCTGGCAAAGAAAG |
| 3897579 | ACGTTGGATGCAAGAACAGCCTTCCTCATC | ACGTTGGATGTAGGGCTTTGTCTGGACTCG |
| 11235437 | ACGTTGGATGAACAGCGCCATTGTTGTTTG | ACGTTGGATGTATGAACCCAGGGTTTGAGG |
| 2508856 | ACGTTGGATGTTGGTGAGTCAGCATTAGCC | ACGTTGGATGCATAAAGAGCAAGAGTGCCC |
| 5792575 | ACGTTGGATGATGGAGCCAGCTTTCCTTAG | ACGTTGGATGCACCCTTCCTCCCTAAATAC |
| 659513 | ACGTTGGATGCCATGTACTTTATCCATGGG | ACGTTGGATGCTTAGCACAGACATAGCAGC |
| 10898820 | ACGTTGGATGAACCCACACTAATATGACGG | ACGTTGGATGCGTTACAGTTTACAAAGGGC |
| 2276397 | ACGTTGGATGTGGGTGAGTGAGCAGCTAG | ACGTTGGATGGATTTCTGGAGTAAGGCTGG |
| 3750908 | ACGTTGGATGGCTTTCCTGCTGTCTTCC | ACACGTTGGATGAAGGGTCAAGTGAATGTGTT |
| 3793938 | ACGTTGGATGAAAAGCAGGACCAGGCATCG | ACGTTGGATGTAGGTCATACAGTGTGTCGG |
| 602285 | ACGTTGGATGAACCCTTAAAGAGCTCCAGC | ACGTTGGATGGTGACACCAATGAATGACGG |
| 2276396 | ACGTTGGATGTTAGGGAAGGAAGTGTGCCG | ACGTTGGATGTAAACGAGACCGTAGTGCTG |
| 2276395 | ACGTTGGATGACAGTCCAGGGAAGCCAAAC | ACGTTGGATGGTCAAAACTCAACAAGCAACC |
| 1806778 | ACGTTGGATGAGCTTGCAGTGATCCGAGAT | ACGTTGGATGGTGTTGTTCATGGTCAATGG |
| 4073394 | ACGTTGGATGTCCTTCTTCTTTACTGGGTC | ACGTTGGATGTCCTTGCACCAGAGCTAATC |
| 471547 | ACGTTGGATGCAGGGCCTTACCTCCATTCT | ACGTTGGATGTCCTAGACAAAGCCTTGTGC |
| 606136 | ACGTTGGATGAGGAGTGAGACTCTAGACAG | ACGTTGGATGAGCTTCCCTGGGCATCTAAA |
| 605241 | ACGTTGGATGACTGGAGAAATCCAAGAGGG | ACGTTGGATGCTCCACCAACAGCGCTGTAG |
| 686063 | ACGTTGGATGCATCACTTGACCCTAGGTGC | ACGTTGGATGTCTTGGGAAGTCACTCTAGG |
| 685749 | ACGTTGGATGCATCACTTGACCCTAGGTGC | ACGTTGGATGTCTTGGGAAGTCACTCTAGG |
| 533207 | ACGTTGGATGACAAGGCAGGTAAGACAAGC | ACGTTGGATGCTCAGGTTTTCTGAGTCCTG |
| 476753 | ACGTTGGATGTCCCTGGGCATCTAAACCTC | ACGTTGGATGAGGAGTGAGACTCTAGACAG |
| NUMA1-AF | ACGTTGGATGCAGGATGCAGAAAACCTGAG | ACGTTGGATGCATCACTTGACCCTAGGTGC |

[0317] TABLE 29

| | | |
|---|---|---|
| dbSNP rs# | Extend Primer | Term Mix |

| | | |
|---|---|---|
| 4945392 | AAATCTCTTTTTCTGTTGAGT | ACT |
| 7938496 | CTGCACTCCAGCCTGGG | ACG |
| 7926550 | GAACTCCTGAGCTCAAA | ACT |
| 7945374 | AGCTCTATTCTCCAGGG | CGT |
| 7949480 | TCCTGACCACATGATCC | ACT |
| 7102523 | CCACACCCATCTGTGTC | ACT |
| 7121260 | AATTAAGTGGTGTAAGATCAAT | ACT |
| 7131230 | CACCGGAGTAATTTTCAG | ACG |
| 7128317 | TTAGTCCTTGCCTCCCC | ACG |
| 2276385 | GGCAAACTATGACCAAATC | ACT |
| 2276384 | TTGGTCATAGTTTGCCC | ACT |
| 2276383 | AGAAGGCCCAAAGGCTA | ACT |
| 1892921 | CCTAACAGATAGTTTTTCAAC | ACG |
| 1892920 | CACTTTTGTAATTCTGGCA | ACG |
| 7942626 | TGCGTTTCTCAGATTGG | ACG |
| 7124429 | TCAAATTGAAAACAGTACATTG | ACT |
| 711408 | TTTTGGAATTAGACAGTGAAA | CGT |
| 7125718 | GTAACTCATTACCCCTTC | ACG |
| 1055452 | TCCTGAGTGGCCCAAGC | ACT |
| 3829215 | GCCACTCAGGACCCCTC | ACG |
| 1541306 | AGTTGTCCCAAAACAAAT | ACG |
| 3814722 | CCATATTCCCTAGAAACC | CGT |
| 1939240 | CTCCTAGGGATGTCAGC | CGT |
| 5743655 | GGAAGGCAGGTGGTGGC | ACT |
| 5743656 | GCTTCTCTTCCCCAGCT | ACT |
| 5743657 | GTCCAAAGCTCTTTTCAT | ACT |
| 3814721 | ACCCCAGGCAGCCTTGC | ACG |
| 5743658 | CATCCTAGGTTCCTCAC | CGT |
| 5743659 | CCCTTCCCTCCTGTTAG | ACT |
| 5743660 | CAGGCTACCCACTCCCC | ACG |
| 5743661 | TCCCAGGCTACCCACTC | CGT |
| 5743662 | GGACCACTTCAGGCTCA | ACT |
| 2298455 | GATACCAGACTGGGATC | ACT |
| 5743664 | TAGACCTCACCCTACCC | ACG |
| 5743665 | CCTTCACTCCAAGGCAA | ACT |
| 5743667 | GAGATGTCTGGGTTCTAG | ACG |
| 5743668 | CAGCGGCTCTGGAGACA | ACT |
| 5743669 | CCTTGGTTGCAGTGGAC | ACG |
| 1573503 | TGGGAGCCCAGGTGACA | ACT |
| 5743670 | ACGTCCGTTACAGAAGT | ACT |
| 5743671 | CCTAGAGAACTGCTCTG | ACG |
| 1892919 | TGCTCTGCTGTGCCCTC | ACG |
| 5743672 | TGCTGAAGTTGGGGAAG | ACG |
| 2735786 | CAGGTGGGTGGGAAGGA | ACT |
| 5743673 | CTGTGCTCCCACGTTCC | ACG |
| 5743674 | ATTAGTTCACAGGCTGC | CGT |
| 1062452 | TGTAGGCTGCGTGGATG | CGT |
| 5743675 | AGAGAGAATGGCAGGAG | ACT |
| 5743676 | CCATTAGCCTTCCTAAC | ACT |
| 760246 | GAACGCTCAAGCCTGGT | ACG |
| 11345794 | CAGGGGAACACAGGCGCT | ACT |
| 5743677 | AAAGAAAAGAGAGAACAGC | ACG |
| 5743678 | TTCCCACACCGATCAAG | ACT |
| 14537 | CCGGGGATGGATCTTTT | ACG |
| 3168177 | CCCACCCCAGTGCAAGT | ACG |
| 5743679 | CCTTCAGCAGCAGCTCA | ACG |
| 1541304 | ACCCCACTCCTGAGACA | ACG |
| 1053725 | GATCTAGAAGGGACCATAA | ACT |
| 5743680 | CAAACCCCTAGAGACAG | ACG |
| 949324 | GGCGGAGGACCAGGTGA | ACT |
| 949323 | CGGAGGACCAGGTGAGG | ACT |
| 5743681 | TGGGGCTCACAAGGGAG | ACT |
| 5743682 | ATAACCCTGGGGCTCAC | ACT |
| 5743683 | ATTCTCATGGAGAGCAC | ACG |
| 5743684 | GCCACCACCACAGCCAG | ACG |
| 5743685 | GTTGAGGATGCTGAAGG | ACG |
| 2845857 | GCGGGACCTTGCTGATA | ACT |
| 2852365 | TGCTGTGCCACGCTCTA | ACG |
| 11538641 | CCCACGCCCCATGACTCC | CGT |
| 11538639 | GGCCACCAGCTGTTTCCCA | ACG |
| 11235417 | GGACAGTTAGGCAGACAGTA | ACT |
| 11538644 | AAACGGGTCTCCCTAGAGC | CGT |
| 11538643 | GACCCCCAAGAGACCCTG | ACG |
| 2845858 | CGAGTGTAGAGTTCTGG | ACT |
| 2155146 | GAGCTCCTGCCTACCCC | CGT |
| 2852364 | CAGGTGGGATTCCAAGG | ACT |
| 2845859 | CCATAAACTTGAAGCCC | ACT |
| 2845860 | CAAGCCTTGGCAGGTGA | ACT |
| 11538642 | CTGGGAAGCAGGAGCAGAC | CGT |
| 7949430 | GTCTTCCAGAAGCTAGAT | ACT |
| 7938674 | AGTGCCAGGGACTGTAC | ACT |
| 2735787 | ACAAAGGCAAGGGCCTG | ACG |
| 11538640 | CACCTATCTCCCAGCGCC | ACG |
| 10736784 | CACCAAGCTTCCTGAACAGC | CGT |
| 10736785 | TGGAGTGGGGTGTGGTTAG | ACT |
| 11826059 | AAGAATTTGAAACTGAAGAGTAC | ACT |
| 2503 | AGGCCCATTGGAGACCG | ACT |
| 2155145 | TGGTATAATACCCGTTTTTC | ACT |
| 4477459 | GATGTGGACTGAAGGGC | ACT |
| NUMA1-AA | CCAAGTGCCTTAGAGTA | ACT |
| 5019605 | ACCCAGGTGCAGAGCCTTA | ACT |
| 5019604 | CATGCCAAGTGCCTTAG | CGT |
| 5019603 | AGGTGCAGAGCCTTACT | ACT |
| 3793941 | AACACTGGTGACACTCT | ACG |
| 11235418 | GGCTTCCTAGGAGGGCTAC | ACT |
| 3793940 | GCTCTTCCTCTTTGTAG | ACT |
| 2032353 | TGGGCAAGTGTCCTAAG | CGT |
| 3934448 | TAAGCCCACAATCCTCC | CGT |
| 7951267 | ACCCCTTGTCCCTGATA | ACT |
| 1053603 | CCAACTCTTGGACATACTT | ACG |
| 1053602 | ACAGGCCCCAAGCTGGA | ACT |
| 11235419 | CGGGAGGCAGAGCAGATG | ACT |
| 1053601 | TAAGCCGGCAGCAGAAC | ACT |
| 3750913 | CTCAGCTGTGTGCTGGGCA | ACT |
| 3750912 | CTTGGGGAGGCCCATCA | ACT |
| 1053600 | GCTGGAGGCTCGATTAC | CGT |
| 1057992 | GTGAGTCCACACCAACC | CGT |
| 2298789 | GAGGAAGGGTATACGGT | ACT |
| 10898813 | CTATGCTGGGTTCATCCCTAA | CGT |
| 11278712 | GAATCCCCATCACCCAGAG | ACG |
| NUMA1-AB | CAGTGAGAAGAGAGTATGGG | ACG |
| 949325 | TCCTCTTCCCTATGCCG | ACG |
| NUMA1-AC | GCCTGTTGCTGATTGCTTCA | ACT |
| 949326 | GAATACCCTTCTTCCTC | ACT |
| 2298456 | GCATAAAGGTGCAAATCTTT | CGT |
| 7949845 | GATGTCAGGAGTTCGAGACC | ACT |
| 7949989 | CCAGCTACTCGGGAGGCT | ACT |
| 1573500 | CCCAAGTAGCTAGAACTA | ACT |
| 4945411 | GAAGTGAAAGTTCTGTGGGG | ACT |
| 3831387 | GGGAAAAAAAAACACACACACA | ACT |
| 11235422 | GCCAAACAGGAGGCAGTCA | CGT |
| 10128658 | GGCTGTCTCTCTTCTCAGTG | ACG |
| 2298457 | AGTTCACCCTGTTTTCT | ACT |
| 3838779 | CCGAACTTCAAGGAGACAGAA | ACT |
| 1573501 | TCATCTGTGCTGCCTCC | ACT |
| 11235424 | CGGAGGCAGCACAGATGAA | ACG |
| 10898814 | GTTGAAGGCTGAGATGGCAAA | ACT |
| 7930142 | CTGAGAACCTCTTTTTATTTTA | ACT |
| 7930544 | CCATTTACAACTGCCCA | ACG |
| 7930721 | TTTGCCAGAAAACTTAGAG | ACT |
| 7930722 | GACAAAAATGTCAGACCT | ACT |
| 6592456 | GGCCAAGTGGCCAAGCA | ACT |
| 11235425 | GTAGGCGATATTGAAATCCCA | ACT |
| 6592457 | CACTGTAGGTTTATAACCTG | ACT |
| 10898815 | TACCAGTTCCTAACTGCCAC | ACT |
| 11235426 | TTGCCCCAGGCCAAGGATA | ACT |
| 10898816 | CTTGGCCTGGGGCAAACAAT | ACG |
| 1939247 | GGGCTCTCTGATGGTTGCAT | CGT |
| 1939246 | GGACACTATCATAGCTCAT | ACT |
| 1939245 | AAGTTGTTTTTAAATGTGAAAGT | ACT |
| 1939244 | GGCCCATGCCTGTAATC | CGT |
| 1939243 | GAGTAGCAGGGACTACG | ACG |
| 4245463 | CAAGACCCTATCTCAAAAAG | CGT |
| 4944258 | GGCCTGAAGTTTTCAGA | CGT |
| 7926751 | TCATGCATGTTCTTTGTTT | ACT |
| 12282917 | ACGTGGTGAGACCCTGTCT | ACG |
| 12282918 | CAACGTGGTGAGACCCTGT | ACG |
| 7937582 | CCTGGGCAACGTGGTGA | ACT |
| 10898817 | AGATGGAGTCTTGCTCTGTC | ACT |
| 7480015 | GAGGCTGAGGCAGGAGGAT | ACG |
| 7123992 | CATTAAGGTCAGCATTTACCAC | ACG |
| 1573502 | AGACAAGCAACATAACCTCTTT | ACG |
| 7127865 | AGAACACCAGGACAGGTGC | ACT |
| 4945426 | GAAGGTGCTCACTGTCTAGTA | CGT |
| 11235428 | GTCTGGCTGTTGCCGCCC | ACT |
| 7122489 | GCTACAATCGCAAGGATCTG | ACT |
| 1894003 | AAACCACCTGCTCAGAC | ACT |
| 1548348 | CTCCTGGCCTATCCGTCC | ACG |
| 1892923 | TGGGGCGCGTACACATACA | ACG |
| 5792570 | AACCCTTTGCTCTGAAAGGC | ACT |
| 7115200 | TGCCTGGCAGGAGCGATC | ACT |
| 4945430 | AAGCAGAGTCTACAAGTCCC | ACT |
| 11235429 | GTCTGACTCTTAGAAGACAAAA | ACG |
| 1939242 | CCACACCTCTCTGTTTC | ACG |
| 9666346 | GTGAGCCGTCGTGCCAAG | ACT |
| 7101553 | GGGATTACAGGTGTGAGCC | ACT |
| 7124000 | GCAACATGGCGAAACCCTG | ACG |
| 12291664 | CAACATAGTGAGAGCCTGTCT | ACG |
| 12291778 | ATAGGCTAAAATGTTTTACATATAA | ACT |
| 12291781 | TAACCAGTAAAACTTCATGATTTA | ACT |
| 12291787 | CTCCTGAGTAGCTGGGACT | ACG |
| 12291788 | GCCTCCTGAGTAGCTGGGA | ACG |
| 12291833 | CAGGAGGCTAGGGTGGGA | ACT |
| 10793016 | TAGGTCAGTAGAATAGTGTCG | ACG |
| 5792571 | CTAACTCCTCCCCCCCCC | CGT |
| 12293529 | AATCTAACTCCTCCCCCCC | ACT |
| 4338555 | GGAACATTCACTTGGGGACTT | ACG |
| 11235431 | TGGTGGGTGGTTGGGATGA | ACT |
| 6592458 | GTTGTGGTGAGCCGAGATC | ACT |
| 4945434 | AGGCTCAGGAATTAGGTGAC | ACG |
| 4945435 | CCGGGAGGCAGAGGTTGC | ACT |
| 11307657 | TCCTCATGAAAATCAACTTTTTTT | CGT |
| 5792573 | TCCTCATGAAAATCAACTTTTTTT | CGT |
| 1894004 | GATCCGAGAGCTTTACAAACACT | ACT |
| 12276164 | CCTCATTGTCCCTCTCCAGA | ACT |
| 4378421 | GGCTGGAGTGCAGTGGCA | ACG |
| 7116495 | TGCTGCTACAACAGGCACG | ACG |
| 7101701 | TGTTGCCTAGGCTGGTCTC | ACT |
| 10736786 | CAGTACCTACTCTTATTTTCTC | ACT |
| 11608165 | CCCTCTGCTTCCCCCTGG | ACT |
| 645603 | CAGATGCTTTTTTTTCCC | ACG |
| 661290 | CATAGATCTAGTGGGCATC | ACT |
| 7122209 | GAAAATGATGATCCCCAAATCT | ACT |
| 12417471 | CTCAGCTACTCAGGAGGCT | ACT |
| 541228 | GGCAGGCGGATCACAAGGT | ACT |
| 12273666 | CATGAGCCATCGCGCCTG | ACT |
| 2511074 | AAGAAACAGAGCGAGACACC | ACT |
| 3018311 | CAGGTGGATCGCCTGAGG | ACT |
| 3018289 | TGTTGGCCAGGCTGTTCTC | ACT |
| 679926 | CCAGGATTAGGAGTGTGACAA | ACT |
| 567026 | CCTTGTCACACTCCTAA | ACG |
| 564294 | TCTGCAACTTGCCCTTTTCA | ACG |
| 678193 | ATGGAAACATGTCAAATAAATTT | ACT |
| 677279 | GTAGCTGGGACTAAAGGTGC | ACT |
| 560777 | TAAGGAATTGCCAGCCATGA | ACG |
| 676721 | CACATTCTTACATAGGATTTTTT | ACG |
| 7106529 | AATACACAAGCTTTTCAACCCA | CGT |
| 11602304 | GAGCCACTGTGCCCAGAC | ACG |
| 585228 | GACCCTATTACTTAAAATGAC | ACT |
| 578957 | TCTCCTCGCATTCTCTCCC | CGT |
| 7110215 | ACCTGAGGTCAGGAGTTTGA | ACT |
| 3133233 | CAGCCTGGGCAACATAGTGA | ACT |
| 3133230 | GGTGTGCACCACCATGCCT | ACT |
| 12576024 | TGGCTTCAGCCTCCCAGG | CGT |
| 674319 | TGGCATGCGCCTGTAGT | ACG |
| 675185 | ATGGGGAAATACTCAAGAAA | ACT |
| 5792574 | ATAATAGTTTTATCCTGCCTTTTT | ACT |
| 12275272 | CACCTTCTCTCAACCTAACCT | ACG |
| 10400327 | ACTTTAAGAGGACTGGCAAGA | ACG |
| 612255 | GGAGTGGAATTTCTTTTTTAC | ACG |
| 7101643 | GCAATTCTCTTTCTTACTCTAAA | ACG |
| 575871 | GCAATTCTCTTTCTTACTCTA | ACT |
| 547208 | GCCTTTCTTTTCTTTTTTTTT | ACG |
| 2511075 | CCAGGGCCAAAATTTATCATTAT | ACT |
| 642573 | CTCAGGACAAAGCTGACCTAT | ACT |
| 482197 | GGGCCTCCTGAGGAAGAAG | ACG |
| 656640 | GGCACACTCCACCACACCT | ACT |
| 671681 | AAAGATTCAGAAAATGAAGGA | ACG |
| 541022 | AACTGGGCATTTGGAGGTCA | ACT |
| 951586 | GGGGCCATTTGGCAGAA | ACT |
| 2511076 | ATTACAGGCGTGAGCCACCG | ACG |
| 11235432 | CCCGCCACCGCGCCCAG | ACT |
| 3018308 | CACCCGCCACCGCGCCC | ACT |
| 11606798 | CTACCTCCTACTGTGGGCAA | ACT |
| 1791544 | CTGATCCACCGCAGCCAG | ACG |
| 3018304 | TTACAGGCATGCGCCACCA | CGT |
| 10751193 | CCAGACTGGAGTACAGTGG | ACT |
| 4945470 | GTTGCAGTGAGCCAAGACTG | ACG |
| 3018291 | CTGTCGCCCAGGCTGGAG | ACT |
| 2511120 | TTAATAGCTGGCACAGTCTA | ACT |
| 671132 | GTTGGTTCTTCCCAGTTGC | ACG |
| 4945475 | TCCAGTGGTGCAATCTCGG | ACT |
| 3018292 | GAGAGAAATCCTCTGTATCT | ACT |
| 642618 | ATGTTGAACTTCCTCATTCTGT | ACG |
| 552966 | TCTCAGATCTCATGCGTAAC | ACT |
| 6592459 | GTGTGAACCTGGGAGGCG | ACT |
| 607446 | TCCCAAAGTCAATCCATCTCTAAG | ACG |
| 607070 | GTCCAGACTCAAAATGA | ACT |
| 10713307 | TGGCTCACGCCTGTAATCC | CGT |
| 3018302 | TGGGGACGGGGAAGGTGCT | ACT |
| 3750909 | TGGGGGAAATCTCAGATCCC | ACT |
| 3018301 | CCCTCATCACCTTTCAC | ACT |
| 2511114 | GGGATAGGCGTTGAGATATA | ACG |
| 12270166 | CCCGGAGATTGAAGCTGCA | ACT |
| 12270241 | TCTGATCTCCCAGGTTATGC | ACG |
| 11606587 | TCATTTTTTTTAGTACTCACGAC | ACT |
| 686340 | CTAGTTCCTTTTCCCCATTAAAA | ACT |
| 548961 | GTGGGGTAGAGAGTGAA | ACG |
| 549032 | CTCTCTACCCCACCCCC | CGT |
| 575831 | GCCCTCTCCTTTGTAGT | ACT |
| 575878 | GGTGCTTAACAAACACATTAA | CGT |
| 577435 | ATGGTAGCACTCGTAACACT | ACT |
| 579320 | GGCTCCTGTCCACCCCC | CGT |
| 495567 | AGTGAATAACATTAAAGTACGATA | ACG |
| 636946 | GCCTAAGCAACATGGCAAAAC | ACG |
| 493065 | GATGTGTAGGTGAGAGACATGC | ACT |
| 597513 | AGGCACAGAGCAGCAAGCAC | CGT |
| 598835 | CTCCTGTTGCATTTTCTGAATG | ACT |
| 10683614 | CTGCACTGGGTTGCTCTGT | ACG |
| 610004 | ATCCCACTTCAGCACCTACA | ACT |
| 61004 | TTGCTGAAGTGGGATGAGCTTCT | ACT |
| 673478 | AAGGGGAGGTCGACTGGG | ACT |
| 670802 | GTCTTGATACCCACCCTCTG | ACT |
| 505041 | ATCGGGGCAAAATCAAA | CGT |
| 2511116 | GGCTGGAGCTGCTCTTA | ACG |
| 628025 | TCCCTCCCCATACCTCCT | ACT |
| 517837 | AATCCTGCTTCCCTCCCCA | ACG |
| 615000 | GGAGGCAGAAGCCAGAT | ACT |
| 482013 | AAGATGGGAGCAAGCTGGCAA | ACG |
| 693391 | GATATCCTGTCTCTCTTTCCAT | ACT |
| 2511079 | GCCTATAGAATTCACTTCA | ACT |
| 2250866 | TAAAGCCAAAAAAGCAAAGAT | ACT |
| 2508860 | CGTGAGCCGCTGTGCCC | ACT |
| 7483267 | AAAATTAGCTGGGCGTGGTG | ACT |
| 2511078 | AATTAGCTGGGCGTGGTGG | ACG |
| 2508859 | GTACCAGTTGTTTGTTGG | ACT |
| 2508858 | GTGCGCAGTGACAGTTA | ACT |
| 11235435 | GCTTGCTGTGATAGAATCGTA | ACT |
| 11235436 | GTATGGCTGTGGAGGGTTG | ACT |
| 639435 | CCTAAGCATAGACAGCATGG | ACT |
| 12285624 | GACGGAGTCTCGCTCTGTC | ACT |
| NUMA1-AD | TGAAACCCCGTCTCTACTAAA | CGT |
| 624363 | GGGCCCCTTTGTACTTTTCA | ACT |
| NUMA1-AE | GGCCCTGCCTCAGACTCA | ACT |
| 1053573 | ACCAAACATGTAAAAACCC | CGT |
| 1053511 | GATCCCCTTCCCACCCT | ACG |
| 1063863 | GGATCTCCCTAGGTCCC | ACG |
| 12137 | TCCTTTTGGCCCCCACCC | ACG |
| 4365081 | CTCACTTGCTCAGGCTTCTA | ACT |
| 4466868 | ATACAGTACCCTAACCTGCTA | ACT |
| 3750911 | ACCAGCTCCTCTTTTGC | ACT |
| 510925 | CTGGGCAGGGCAGACTGT | ACT |
| 595062 | CTGTGACACTCTTGAGGGC | ACT |
| 1053443 | ATGTGTCTGCTGCAGACT | ACG |
| 542752 | TGCTATGTCTCAGCTCC | CGT |
| 3897579 | TGTTCGCTTCCAAGATG | ACT |
| 11235437 | AGTACAGTGGCACAGTCCTA | ACT |
| 2508856 | GGATGTCCCCCTGGGCC | ACG |
| 5792575 | TAGTTTTATCTTTGGCAAACATTT | ACT |
| 659513 | CCCTAGACCAGGTGGCCAGTCA | ACG |
| 10898820 | CACACTAATATGACGGATGTCT | ACT |
| 2276397 | GCTAGCACAGCACAGAGACC | ACG |
| 3750908 | GCTGTCTTCCACCCTATCCC | ACG |
| 3793938 | ATCGATTATTTTCTCCTGCT | ACG |
| 602285 | CTCGAGACTAAGCCCCACCC | ACT |
| 2276396 | GCCTACCTATCTGCCCC | ACT |
| 2276395 | AGACATGCAGTAGACTTAGT | ACT |
| 1806778 | CGACAGAGCCAGACTCC | ACT |
| 4073394 | TTACTGGGTCAGCTCCCTCC | ACT |
| 471547 | TGGTTAGACCCTCTGTT | CGT |
| 606136 | TGTCCTCCTACCCCATGGCA | ACT |
| 605241 | AGCAAGCTGGTGTCAGA | ACT |
| 686063 | AGCCCAGAAATTTTATGCAATTGA | ACG |
| 685749 | CATGATTTCTCAGGTTTTCTGA | ACT |
| 533207 | AAGACAAGCAGAAATGGTGGAG | ACT |
| 476753 | TCTAAACCTCAGTTGCC | ACT |
| NUMA1-AF | GAAATCATGAGTCAATTGCATAA | CGT |

Genetic Analysis of Allelotyping Results

[0318] Allelotyping results are shown for cases and controls in Table 30. The allele frequency for the A2 allele is noted in the fifth and sixth columns for breast cancer pools and control pools, respectively, where “AF” is allele frequency. SNPs with blank allele frequencies were untyped.

TABLE 30

| | | | | | | | | Breast |
|---|---|---|---|---|---|---|---|---|
| | | | | | | | | Cancer |
| | Position in | Chromosome | A1/A2 | | | | | Associated |
| dbSNP rs# | SEQ ID NO: 4 | Position | Allele | Case AF | Control AF | p-Value | OR | Allele |
| 4945392 | 203 | 71420953 | T/C | T = 0.999 | T = 0.998 | 0.936 | 0.74 | T |
| | | | | C = 0.001 | C = 0.002 | | | |
| 7938496 | 1236 | 71421986 | G/A | G = 0.988 | G = 0.966 | 0.233 | 0.34 | G |
| | | | | A = 0.012 | A = 0.034 | | | |
| 7926550 | 1768 | 71422518 | C/G | C = 1 | C = 1 | 0.956 | 0.00 | C |
| | | | | G = 0 | G = 0.000 | | | |
| 7945374 | 2101 | 71422851 | A/T | A = 1 | A = 0.999 | 0.964 | 0.72 | A |
| | | | | T = 0.000 | T = 0.001 | | | |
| 7949480 | 3146 | 71423896 | T/C | T = 0.126 | T = 0 | 0.0000166 | 0.00 | T |
| | | | | C = 0.874 | C = 1 | | | |
| 7102523 | 4476 | 71425226 | T/C | T = 0.046 | T = 0.031 | 0.337 | 0.67 | T |
| | | | | C = 0.954 | C = 0.969 | | | |
| 7121260 | 6124 | 71426874 | A/G | A = 0.954 | A = 0.994 | 0.00306 | 6.99 | G |
| | | | | G = 0.046 | G = 0.006 | | | |
| 7131230 | 6719 | 71427469 | C/T | C = 0.319 | C = 0.368 | 0.106 | 1.24 | T |
| | | | | T = 0.681 | T = 0.632 | | | |
| 7128317 | 6925 | 71427675 | G/A | G = 0.906 | G = 0.958 | 0.00239 | 2.33 | A |
| | | | | A = 0.094 | A = 0.042 | | | |
| 2276385 | 7060 | 71427810 | C/G | C = 0.962 | C = 0.996 | 0.00315 | 9.57 | G |
| | | | | G = 0.038 | G = 0.004 | | | |
| 2276384 | 7081 | 71427831 | T/C | T = 0.996 | T = 0.994 | 0.864 | 0.74 | T |
| | | | | C = 0.004 | C = 0.006 | | | |
| 2276383 | 7090 | 71427840 | A/G | A = 0.0660 | A = 0.015 | 0.00194 | 0.21 | A |
| | | | | G = 0.934 | G = 0.985 | | | |
| 1892921 | 7696 | 71428446 | C/T | C = 0.091 | C = 0.036 | 0.0015 | 0.37 | C |
| | | | | T = 0.909 | T = 0.964 | | | |
| 1892920 | 7989 | 71428739 | C/T | C = 0.997 | C = 0.997 | 0.973 | 1.09 | T |
| | | | | T = 0.003 | T = 0.003 | | | |
| 7942626 | 9407 | 71430157 | G/A | G = 0.061 | G = 0.026 | 0.0929 | 0.41 | G |
| | | | | A = 0.939 | A = 0.974 | | | |
| 7124429 | 9699 | 71430449 | T/G | T = 0.001 | T = 0.001 | 0.956 | 0.25 | T |
| | | | | G = 0.999 | G = 0.999 | | | |
| 7114081 | 9905 | 71430655 | A/T | A = 0.001 | A = 0.001 | 0.952 | 0.53 | A |
| | | | | T = 0.999 | T = 0.999 | | | |
| 7125718 | 9984 | 71430734 | C/T | C = 1 | C = 1 | 0.944 | 0.39 | C |
| | | | | T = 0.000 | T = 0.000 | | | |
| 1055452 | 13023 | 71433773 | T/C | T = 0.106 | T = 0.081 | 0.211 | 0.75 | T |
| | | | | C = 0.894 | C = 0.919 | | | |
| 3829215 | 13047 | 71433797 | G/A | G = 0.968 | G = 0.984 | 0.22 | 1.95 | A |
| | | | | A = 0.032 | A = 0.016 | | | |
| 1541306 | 13571 | 71434321 | C/T | C = 0.2 | C = 0.131 | 0.00398 | 0.60 | C |
| | | | | T = 0.800 | T = 0.869 | | | |
| 3814722 | 14086 | 71434836 | C/A | C = 0.999 | C = 0.998 | 0.953 | 0.79 | C |
| | | | | A = 0.001 | A = 0.002 | | | |
| 1939240 | 14337 | 71435087 | T/A | T = 0.001 | T = 0.002 | 0.886 | 22.72 | A |
| | | | | A = 0.999 | A = 0.998 | | | |
| 5743655 | 14462 | 71435212 | T/C | T = 0.007 | T = | | | |
| | | | | C = 0.993 | C = | | | |
| 5743656 | 14518 | 71435268 | A/G | A = 0.003 | A = 0.001 | 0.819 | 0.29 | A |
| | | | | G = 0.997 | G = 0.999 | | | |
| 5743657 | 14695 | 71435445 | A/G | A = 0.002 | A = 0.002 | 0.943 | 0.70 | A |
| | | | | G = 0.998 | G = 0.998 | | | |
| 3814721 | 14830 | 71435580 | G/A | G = 0.152 | G = 0.087 | 0.00211 | 0.53 | G |
| | | | | A = 0.848 | A = 0.913 | | | |
| 5743658 | 15282 | 71436032 | C/A | C = 0.038 | C = 0.021 | 0.386 | 0.54 | C |
| | | | | A = 0.962 | A = 0.979 | | | |
| 5743659 | 15436 | 71436186 | A/G | A = 0.004 | A = 0.003 | 0.892 | 0.67 | A |
| | | | | G = 0.996 | G = 0.997 | | | |
| 5743660 | 15745 | 71436495 | G/A | G = 1 | G = 1 | 0.967 | 0.62 | G |
| | | | | A = 0.000 | A = 0.000 | | | |
| 5743661 | 15748 | 71436498 | G/T | G = 1 | G = 1 | 0.981 | 0.40 | G |
| | | | | T = 0.000 | T = 0.000 | | | |
| 5743662 | 15797 | 71436547 | T/C | T = 1 | T = 1 | 0.998 | 0.96 | T |
| | | | | C = 0.000 | C = 0.000 | | | |
| 2298455 | 16036 | 71436786 | T/G | T = 0.908 | T = 0.919 | 0.57 | 1.15 | G |
| | | | | G = 0.092 | G = 0.081 | | | |
| 5743664 | 16646 | 71437396 | G/A | G = 1 | G = 0.999 | 0.947 | 0.56 | G |
| | | | | A = 0.000 | A = 0.001 | | | |
| 5743665 | 16713 | 71437463 | A/G | A = 1 | A = 1 | 0.971 | 2.04 | G |
| | | | | G = 0.000 | G = 0.000 | | | |
| 5743667 | 16859 | 71437609 | G/A | G = 0.999 | G = 0.998 | 0.924 | 0.64 | G |
| | | | | A = 0.001 | A = 0.002 | | | |
| 5743668 | 16914 | 71437664 | G/— | G = 0.002 | G = 0.002 | 0.949 | 0.69 | G |
| | | | | — = 0.998 | — = 0.998 | | | |
| 5743669 | 17422 | 71438172 | C/T | C = 1 | C = 0.999 | 0.91 | 0.40 | C |
| | | | | T = 0.000 | T = 0.001 | | | |
| 1573503 | 17499 | 71438249 | A/G | A = 0.044 | A = 0.019 | 0.0808 | 0.42 | A |
| | | | | G = 0.956 | G = 0.981 | | | |
| 5743670 | 17646 | 71438396 | G/C | G = 0.005 | G = 0.004 | 0.935 | 0.84 | G |
| | | | | C = 0.995 | C = 0.996 | | | |
| 5743671 | 17681 | 71438431 | G/A | G = 0.999 | G = 0.999 | 0.939 | 1.51 | A |
| | | | | A = 0.001 | A = 0.001 | | | |
| 1892919 | 17733 | 71438483 | C/T | C = 0.085 | C = 0.046 | 0.0269 | 0.52 | C |
| | | | | T = 0.915 | T = 0.954 | | | |
| 5743672 | 17841 | 71438591 | G/A | G = 0.999 | G = 0.999 | 0.934 | 0.64 | G |
| | | | | A = 0.001 | A = 0.001 | | | |
| 2735786 | 17963 | 71438713 | A/G | A = 0.004 | A = 0.004 | 0.935 | 1.23 | G |
| | | | | G = 0.996 | G = 0.996 | | | |
| 5743673 | 18011 | 71438761 | G/A | G = 1 | G = 0.999 | 0.907 | 0.46 | G |
| | | | | A = 0.000 | A = 0.001 | | | |
| 5743674 | 18238 | 71438988 | A/T | A = 1 | A = 1 | 0.921 | 6.24 | T |
| | | | | T = 0.000 | T = 0.000 | | | |
| 1062452 | 18569 | 71439319 | C/A | C = 1 | C = 0.998 | 0.862 | 0.41 | C |
| | | | | A = 0.000 | A = 0.002 | | | |
| 5743675 | 18672 | 71439422 | T/C | T = 0.003 | T = 0.002 | 0.957 | 0.79 | T |
| | | | | C = 0.997 | C = 0.998 | | | |
| 5743676 | 18715 | 71439465 | A/G | A = 0.003 | A = 0.003 | 0.954 | 1.22 | G |
| | | | | G = 0.997 | G = 0.997 | | | |
| 760246 | 18927 | 71439677 | C/T | C = 0.001 | C = 0.001 | 0.995 | 0.92 | C |
| | | | | T = 0.999 | T = 0.999 | | | |
| 11345794 | 19266 | 71440016 | T/— | T = 1 | T = 0.999 | 0.861 | 0.00 | T |
| | | | | — = 0 | — = 0.001 | | | |
| 5743677 | 19290 | 71440040 | C/T | C = 1 | C = 1 | 0.996 | 0.96 | C |
| | | | | T = 0.000 | T = 0.000 | | | |
| 5743678 | 19456 | 71440206 | T/G | T = 0.999 | T = 0.999 | 0.995 | 1.05 | G |
| | | | | G = 0.001 | G = 0.001 | | | |
| 14537 | 19511 | 71440261 | C/T | C = 0.999 | C = 1 | 0.926 | 1.86 | T |
| | | | | T = 0.001 | T = 0.000 | | | |
| 3168177 | 19575 | 71440325 | G/A | G = 1 | G = 1 | 0.964 | 0.59 | G |
| | | | | A = 0.000 | A = 0.000 | | | |
| 5743679 | 19591 | 71440341 | G/A | G = 1 | G = 0.999 | 0.905 | 0.42 | G |
| | | | | A = 0.000 | A = 0.001 | | | |
| 1541304 | 19636 | 71440386 | G/A | G = 0.994 | G = 0.994 | 0.969 | 0.92 | G |
| | | | | A = 0.006 | A = 0.006 | | | |
| 1053725 | 19770 | 71440520 | A/G | A = 0.002 | A = 0.001 | 0.867 | 0.02 | A |
| | | | | G = 0.998 | G = 0.999 | | | |
| 5743680 | 20002 | 71440752 | G/A | G = 0.001 | G = 0.002 | 0.941 | 1.82 | A |
| | | | | A = 0.999 | A = 0.998 | | | |
| 949324 | 20084 | 71440834 | G/C | G = 0.998 | G = 0.996 | 0.821 | 0.57 | G |
| | | | | C = 0.002 | C = 0.004 | | | |
| 949323 | 20086 | 71440836 | A/C | A = 0.573 | A = 0.555 | 0.613 | 0.93 | A |
| | | | | C = 0.427 | C = 0.445 | | | |
| 5743681 | 20246 | 71440996 | T/C | T = 0.005 | T = 0.005 | 0.982 | 0.92 | T |
| | | | | C = 0.995 | C = 0.995 | | | |
| 5743682 | 20253 | 71441003 | T/C | T = 0.999 | T = 0.999 | 0.987 | 0.92 | T |
| | | | | C = 0.001 | C = 0.001 | | | |
| 5743683 | 20300 | 71441050 | G/A | G = 0.999 | G = 1 | 0.933 | 1.90 | A |
| | | | | A = 0.001 | A = 0.000 | | | |
| 5743684 | 20539 | 71441289 | G/A | G = 1 | G = 1 | 0.985 | 1.59 | A |
| | | | | A = 0.000 | A = 0.000 | | | |
| 5743685 | 20682 | 71441432 | C/T | C = 0.999 | C = 0.998 | 0.927 | 0.67 | C |
| | | | | T = 0.001 | T = 0.002 | | | |
| 2845857 | 20773 | 71441523 | G/C | G = 0.603 | G = 0.632 | 0.403 | 1.13 | C |
| | | | | C = 0.397 | C = 0.368 | | | |
| 2852365 | 20776 | 71441526 | G/A | G = 0.717 | G = 0.584 | 0.0000557 | 0.55 | G |
| | | | | A = 0.283 | A = 0.416 | | | |
| 11538641 | 20904 | 71441654 | C/A | C = 1 | C = 1 | 0.988 | | A |
| | | | | A = 0.000 | A = 0 | | | |
| 11538639 | 20918 | 71441668 | C/T | C = 1 | C = 0.999 | 0.866 | 0.12 | C |
| | | | | T = 0.000 | T = 0.001 | | | |
| 11235417 | 20978 | 71441728 | A/G | A = 0.001 | A = 0.002 | 0.942 | 1.83 | G |
| | | | | G = 0.999 | G = 0.998 | | | |
| 11538644 | 21269 | 71442019 | C/A | C = 0.992 | C = 0.999 | 0.709 | 5.16 | A |
| | | | | A = 0.008 | A = 0.001 | | | |
| 11538643 | 21354 | 71442104 | C/T | C = 1 | C = 0.999 | 0.86 | 0.10 | C |
| | | | | T = 0.000 | T = 0.001 | | | |
| 2845858 | 21488 | 71442238 | T/C | T = 0.002 | T = 0.001 | 0.969 | 0.74 | T |
| | | | | C = 0.998 | C = 0.999 | | | |
| 2155146 | 21656 | 71442406 | G/T | G = 0.985 | G = 0.988 | 0.843 | 1.25 | T |
| | | | | T = 0.015 | T = 0.012 | | | |
| 2852364 | 21793 | 71442543 | T/C | T = 0.001 | T = 0.001 | 0.957 | 0.50 | T |
| | | | | C = 0.999 | C = 0.999 | | | |
| 2845859 | 22084 | 71442834 | A/G | A = 0.999 | A = 0.999 | 0.991 | 1.06 | G |
| | | | | G = 0.001 | G = 0.001 | | | |
| 2845860 | 22219 | 71442969 | T/C | T = 0.998 | T = 0.996 | 0.789 | 0.51 | T |
| | | | | C = 0.002 | C = 0.004 | | | |
| 11538642 | 22815 | 71443565 | G/T | G = 1 | G = 1 | 0.986 | 2.89 | T |
| | | | | T = 0.000 | T = 0.000 | | | |
| 7949430 | 22858 | 71443608 | T/C | T = 0.003 | T = 0.001 | 0.767 | 0.20 | T |
| | | | | C = 0.997 | C = 0.999 | | | |
| 7938674 | 22895 | 71443645 | T/C | T = 1 | T = 0.999 | 0.982 | 0.83 | T |
| | | | | C = 0.000 | C = 0.001 | | | |
| 2735787 | 23431 | 71444181 | C/T | C = 0.976 | C = 0.998 | 0.323 | 10.97 | T |
| | | | | T = 0.024 | T = 0.002 | | | |
| 11538640 | 23968 | 71444718 | C/T | C = 0.001 | C = 0.002 | 0.903 | 3.80 | T |
| | | | | T = 0.999 | T = 0.998 | | | |
| 10736784 | 24469 | 71445219 | T/A | T = 1 | T = 0.992 | 0.685 | 0.11 | T |
| | | | | A = 0.000 | A = 0.008 | | | |
| 10736785 | 24470 | 71445220 | A/C | A = 0.995 | A = 0.998 | 0.744 | 2.15 | C |
| | | | | C = 0.005 | C = 0.002 | | | |
| 11826059 | 24853 | 71445603 | T/C | T = 1 | T = 1 | 1 | | |
| | | | | C = 0 | C = 0 | | | |
| 2503 | 24961 | 71445711 | T/C | T = 0.071 | T = 0.041 | 0.0658 | 0.55 | T |
| | | | | C = 0.929 | C = 0.959 | | | |
| 2155145 | 25177 | 71445927 | A/C | A = 0.994 | A = 0.995 | 0.894 | 1.36 | C |
| | | | | C = 0.006 | C = 0.005 | | | |
| 4477459 | 26174 | 71446924 | T/C | T = 0.047 | T = 0.022 | 0.112 | 0.46 | T |
| | | | | C = 0.953 | C = 0.978 | | | |
| NUMA1-AA | 26334 | 71447084 | T/— | T = 0.993 | T = | | | |
| | | | | — = 0.007 | — = | | | |
| 5019605 | 26337 | 71447087 | C/G | C = 0.996 | C = 0.992 | 0.855 | 0.49 | C |
| | | | | G = 0.004 | G = 0.008 | | | |
| 5019604 | 26338 | 71447088 | A/T | A = 0.001 | A = | | | |
| | | | | T = 0.999 | T = | | | |
| 5019603 | 26339 | 71447089 | C/G | C = 0.993 | C = 0.993 | 0.979 | 0.93 | C |
| | | | | G = 0.007 | G = 0.007 | | | |
| 3793941 | 26965 | 71447715 | G/A | G = 0.551 | G = 0.565 | 0.645 | 1.06 | A |
| | | | | A = 0.449 | A = 0.435 | | | |
| 11235418 | 27278 | 71448028 | C/G | C = 1 | C = 1 | 0.98 | | G |
| | | | | G = 0.000 | G = 0 | | | |
| 3793940 | 28042 | 71448792 | A/G | A = 0.003 | A = 0.002 | 0.92 | 0.62 | A |
| | | | | G = 0.997 | G = 0.998 | | | |
| 2032353 | 28520 | 71449270 | G/T | G = 1 | G = 0.999 | 0.937 | 0.53 | G |
| | | | | T = 0.000 | T = 0.001 | | | |
| 3934448 | 28533 | 71449283 | G/T | G = 1 | G = 1 | 0.976 | 0.60 | G |
| | | | | T = 0.000 | T = 0.000 | | | |
| 7951267 | 28764 | 71449514 | A/G | A = 0.003 | A = 0.002 | 0.945 | 0.75 | A |
| | | | | G = 0.997 | G = 0.998 | | | |
| 1053603 | 29685 | 71450435 | G/A | G = 0.999 | G = 0.999 | 0.977 | 0.84 | G |
| | | | | A = 0.001 | A = 0.001 | | | |
| 1053602 | 30738 | 71451488 | A/G | A = 0.003 | A = 0.002 | 0.974 | 0.87 | A |
| | | | | G = 0.997 | G = 0.998 | | | |
| 11235419 | 31175 | 71451925 | T/C | T = 0.002 | T = 0.002 | 0.957 | 1.28 | C |
| | | | | C = 0.998 | C = 0.998 | | | |
| 1053601 | 31490 | 71452240 | A/G | A = 0.002 | A = 0.002 | 0.987 | 1.12 | G |
| | | | | G = 0.998 | G = 0.998 | | | |
| 3750913 | 31726 | 71452476 | G/C | G = 0.114 | G = 0.037 | 0.00136 | 0.29 | G |
| | | | | C = 0.886 | C = 0.963 | | | |
| 3750912 | 31770 | 71452520 | A/G | A = 0.006 | A = 0.003 | 0.825 | 0.49 | A |
| | | | | G = 0.994 | G = 0.997 | | | |
| 1053600 | 31792 | 71452542 | T/A | T = 0.001 | T = 0.001 | 0.932 | 2.89 | A |
| | | | | A = 0.999 | A = 0.999 | | | |
| 1057992 | 32980 | 71453730 | C/A | C = 0.982 | C = 0.997 | 0.38 | 5.78 | A |
| | | | | A = 0.018 | A = 0.003 | | | |
| 2298789 | 33398 | 71454148 | A/G | A = 0.998 | A = 1 | 0.833 | 3.32 | G |
| | | | | G = 0.002 | G = 0.000 | | | |
| 10898813 | 33580 | 71454330 | T/A | T = 0.075 | T = 0.049 | 0.174 | 0.63 | T |
| | | | | A = 0.925 | A = 0.951 | | | |
| NUMA1-AB | 34941 | 71455691 | C/T | C = 0.098 | C = 0.009 | 0.00000449 | 0.08 | C |
| | | | | T = 0.902 | T = 0.991 | | | |
| 949325 | 35214 | 71455964 | G/A | G = 0.875 | G = 0.932 | 0.0108 | 1.96 | A |
| | | | | A = 0.125 | A = 0.068 | | | |
| NUMA1-AC | 35629 | 71456379 | G/C | G = 0.061 | G = 0.007 | 0.000244 | 0.10 | G |
| | | | | C = 0.939 | C = 0.993 | | | |
| 949326 | 35864 | 71456614 | T/C | T = 0.975 | T = 0.989 | 0.233 | 2.28 | C |
| | | | | C = 0.025 | C = 0.011 | | | |
| 2298456 | 36273 | 71457023 | A/T | A = 0.89 | A = 0.996 | 0.0000541 | 28.64 | T |
| | | | | T = 0.110 | T = 0.004 | | | |
| 7949845 | 37281 | 71458031 | A/G | A = 0.998 | A = 0.998 | 0.995 | 1.04 | G |
| | | | | G = 0.002 | G = 0.002 | | | |
| 7949989 | 37378 | 71458128 | A/G | A = 0.036 | A = 0.03 | 0.764 | 0.83 | A |
| | | | | G = 0.964 | G = 0.970 | | | |
| 1573500 | 38348 | 71459098 | C/G | C = 0.172 | C = 0.116 | 0.0235 | 0.63 | C |
| | | | | G = 0.828 | G = 0.884 | | | |
| 4945411 | 38608 | 71459358 | A/G | A = 0.938 | A = 0.984 | 0.00931 | 4.04 | G |
| | | | | G = 0.062 | G = 0.016 | | | |
| 11235422 | 39049 | 71459799 | C/A | C = 1 | C = 1 | 0.958 | 2.79 | A |
| | | | | A = 0.000 | A = 0.000 | | | |
| 10128658 | 39077 | 71459827 | C/T | C = 0.168 | C = 0.102 | 0.0027 | 0.56 | C |
| | | | | T = 0.832 | T = 0.898 | | | |
| 2298457 | 39769 | 71460519 | T/C | T = 0.192 | T = 0.089 | 0.00000854 | 0.41 | T |
| | | | | C = 0.808 | C = 0.911 | | | |
| 3838779 | 40555 | 71461305 | T/— | T = 0.071 | T = 0.029 | 0.0118 | 0.38 | T |
| | | | | — = 0.929 | — = 0.971 | | | |
| 1573501 | 41251 | 71462001 | T/C | T = 0.996 | T = 0.996 | 0.925 | 1.20 | C |
| | | | | C = 0.004 | C = 0.004 | | | |
| 11235424 | 41270 | 71462020 | C/T | C = 1 | C = 1 | 0.965 | 9.18 | T |
| | | | | T = 0.000 | T = 0.000 | | | |
| 10898814 | 42063 | 71462813 | T/C | T = 0.193 | T = 0.108 | 0.000353 | 0.50 | T |
| | | | | C = 0.807 | C = 0.892 | | | |
| 7930142 | 42574 | 71463324 | T/C | T = 0.945 | T = 0.996 | 0.0024 | 12.18 | C |
| | | | | C = 0.055 | C = 0.004 | | | |
| 7930544 | 42912 | 71463662 | C/T | C = 0.149 | C = 0.082 | 0.00224 | 0.50 | C |
| | | | | T = 0.851 | T = 0.918 | | | |
| 7930721 | 43039 | 71463789 | A/C | A = 0.759 | A = 0.806 | 0.198 | 1.31 | C |
| | | | | C = 0.241 | C = 0.194 | | | |
| 7930722 | 43042 | 71463792 | C/G | C = 0.504 | C = 0.419 | 0.0187 | 0.71 | C |
| | | | | G = 0.496 | G = 0.581 | | | |
| 6592456 | 43221 | 71463971 | A/G | A = 0.994 | A = 0.997 | 0.734 | 1.91 | G |
| | | | | G = 0.006 | G = 0.003 | | | |
| 11235425 | 43518 | 71464268 | T/C | T = 0.001 | T = 0.001 | 0.992 | 1.17 | C |
| | | | | C = 0.999 | C = 0.999 | | | |
| 6592457 | 43644 | 71464394 | G/C | G = 0.0640 | G = 0.041 | 0.216 | 0.61 | G |
| | | | | C = 0.936 | C = 0.959 | | | |
| 10898815 | 44981 | 71465731 | A/G | A = 0.578 | A = 0.577 | 0.98 | 1.00 | A |
| | | | | G = 0.422 | G = 0.423 | | | |
| 11235426 | 45013 | 71465763 | T/C | T = 0 | T = 0.002 | 0.884 | | C |
| | | | | C = 1 | C = 0.998 | | | |
| 10898816 | 45038 | 71465788 | C/T | C = 0.999 | C = 0.998 | 0.948 | 0.77 | C |
| | | | | T = 0.001 | T = 0.002 | | | |
| 1939247 | 46079 | 71466829 | T/A | T = 0.098 | T = 0.054 | 0.0313 | 0.52 | T |
| | | | | A = 0.902 | A = 0.946 | | | |
| 1939246 | 47848 | 71468598 | T/G | T = 1 | T = 0.999 | 0.946 | 0.65 | T |
| | | | | G = 0.000 | G = 0.001 | | | |
| 1939245 | 48090 | 71468840 | A/G | A = 0.984 | A = 0.998 | 0.254 | 6.60 | G |
| | | | | G = 0.016 | G = 0.002 | | | |
| 1939244 | 48147 | 71468897 | G/T | G = 0.664 | G = 0.635 | 0.347 | 0.88 | G |
| | | | | T = 0.336 | T = 0.365 | | | |
| 1939243 | 48293 | 71469043 | C/T | C = 0.073 | C = 0.005 | 0.00105 | 0.06 | C |
| | | | | T = 0.927 | T = 0.995 | | | |
| 4245463 | 48771 | 71469521 | C/A | C = 0.038 | C = 0.011 | 0.0369 | 0.28 | C |
| | | | | A = 0.962 | A = 0.989 | | | |
| 4944258 | 48951 | 71469701 | A/T | A = 0.943 | A = 0.994 | 0.00184 | 8.94 | T |
| | | | | T = 0.057 | T = 0.006 | | | |
| 7926751 | 49972 | 71470722 | T/G | T = 0.103 | T = 0.046 | 0.00205 | 0.42 | T |
| | | | | G = 0.897 | G = 0.954 | | | |
| 12282917 | 50161 | 71470911 | G/A | G = 0.999 | G = 0.998 | 0.871 | 0.46 | G |
| | | | | A = 0.001 | A = 0.002 | | | |
| 12282918 | 50163 | 71470913 | G/A | G = 0.999 | G = 0.996 | 0.792 | 0.46 | G |
| | | | | A = 0.001 | A = 0.004 | | | |
| 7937582 | 50171 | 71470921 | T/C | T = 0.992 | T = 0.996 | 0.645 | 2.05 | C |
| | | | | C = 0.008 | C = 0.004 | | | |
| 10898817 | 51289 | 71472039 | T/C | T = 0.957 | T = 0.976 | 0.383 | 1.80 | C |
| | | | | C = 0.043 | C = 0.024 | | | |
| 7480015 | 51699 | 71472449 | G/A | G = 0.848 | G = 0.841 | 0.771 | 0.95 | G |
| | | | | A = 0.152 | A = 0.159 | | | |
| 7123992 | 52005 | 71472755 | C/T | C = 0.083 | C = 0.049 | 0.0525 | 0.56 | C |
| | | | | T = 0.917 | T = 0.951 | | | |
| 1573502 | 52986 | 71473736 | G/A | G = 0.111 | G = 0.049 | 0.000664 | 0.40 | G |
| | | | | A = 0.889 | A = 0.951 | | | |
| 7127865 | 53339 | 71474089 | G/C | G = 0.146 | G = 0.077 | 0.00143 | 0.49 | G |
| | | | | C = 0.854 | C = 0.923 | | | |
| 4945426 | 53704 | 71474454 | C/A | C = 0.113 | C = 0.0640 | 0.0563 | 0.54 | C |
| | | | | A = 0.887 | A = 0.936 | | | |
| 11235428 | 54615 | 71475365 | G/C | G = 1 | G = 0.999 | 0.92 | 0.33 | G |
| | | | | C = 0.000 | C = 0.001 | | | |
| 7122489 | 55307 | 71476057 | A/C | A = 1 | A = 0.999 | 0.957 | 0.53 | A |
| | | | | C = 0.000 | C = 0.001 | | | |
| 1894003 | 55834 | 71476584 | T/C | T = 0.195 | T = 0.118 | 0.00112 | 0.55 | T |
| | | | | C = 0.805 | C = 0.882 | | | |
| 1548348 | 56475 | 71477225 | G/A | G = 0.977 | G = 0.985 | 0.51 | 1.52 | A |
| | | | | A = 0.023 | A = 0.015 | | | |
| 1892923 | 57053 | 71477803 | G/A | G = 0.022 | G = 0.007 | 0.444 | 0.28 | G |
| | | | | A = 0.978 | A = 0.993 | | | |
| 5792570 | 57355 | 71478105 | —/G | — = 0 | — = 0.001 | 0.962 | | G |
| | | | | G = 1 | G = 0.999 | | | |
| 7115200 | 57718 | 71478468 | T/G | T = 0.541 | T = 0.524 | 0.614 | 0.93 | T |
| | | | | G = 0.459 | G = 0.476 | | | |
| 4945430 | 58703 | 71479453 | G/C | G = 0.279 | G = 0.191 | 0.00233 | 0.61 | G |
| | | | | C = 0.721 | C = 0.809 | | | |
| 11235429 | 58772 | 71479522 | C/T | C = 0.001 | C = 0.001 | 0.945 | 2.60 | T |
| | | | | T = 0.999 | T = 0.999 | | | |
| 1939242 | 59140 | 71479890 | C/T | C = 0.097 | C = 0.058 | 0.0268 | 0.57 | C |
| | | | | T = 0.903 | T = 0.942 | | | |
| 9666346 | 59450 | 71480200 | G/C | G = 0.939 | G = 0.958 | 0.251 | 1.49 | C |
| | | | | C = 0.061 | C = 0.042 | | | |
| 7101553 | 59461 | 71480211 | T/C | T = 0.999 | T = 0.999 | 0.978 | 0.84 | T |
| | | | | C = 0.001 | C = 0.001 | | | |
| 7124000 | 59896 | 71480646 | C/T | C = 0.938 | C = 0.955 | 0.437 | 1.38 | T |
| | | | | T = 0.062 | T = 0.045 | | | |
| 12291664 | 60157 | 71480907 | G/A | G = 0.93 | G = 0.958 | 0.213 | 1.73 | A |
| | | | | A = 0.070 | A = 0.042 | | | |
| 12291778 | 60369 | 71481119 | A/G | A = 0 | A = 0 | 1 | | |
| | | | | G = 1 | G = 1 | | | |
| 12291781 | 60395 | 71481145 | A/G | A = 0.004 | A = 0.003 | 0.928 | 0.58 | A |
| | | | | G = 0.996 | G = 0.997 | | | |
| 12291787 | 60424 | 71481174 | G/A | G = 0.997 | G = 0.998 | 0.979 | 1.08 | A |
| | | | | A = 0.003 | A = 0.002 | | | |
| 12291788 | 60426 | 71481176 | G/A | G = 0.998 | G = 0.997 | 0.944 | 0.81 | G |
| | | | | A = 0.002 | A = 0.003 | | | |
| 12291833 | 60456 | 71481206 | A/G | A = 0.002 | A = 0.003 | 0.841 | 2.31 | G |
| | | | | G = 0.998 | G = 0.997 | | | |
| 10793016 | 60621 | 71481371 | G/A | G = 0.097 | G = 0.054 | 0.0219 | 0.53 | G |
| | | | | A = 0.903 | A = 0.946 | | | |
| 5792571 | 61207 | 71481957 | G/— | G = 0.202 | G = 0.155 | 0.0543 | 0.72 | G |
| | | | | — = 0.798 | — = 0.845 | | | |
| 12293529 | 61209 | 71481959 | G/C | G = 1 | G = 1 | 0.99 | 0.84 | G |
| | | | | C = 0.000 | C = 0.000 | | | |
| 4338555 | 61254 | 71482004 | C/T | C = 0.949 | C = 0.979 | 0.0733 | 2.50 | T |
| | | | | T = 0.051 | T = 0.021 | | | |
| 11235431 | 61854 | 71482604 | C/G | C = 0.003 | C = 0.004 | 0.972 | 1.10 | G |
| | | | | G = 0.997 | G = 0.996 | | | |
| 6592458 | 63103 | 71483853 | A/G | A = 0.986 | A = 0.995 | 0.601 | 2.43 | G |
| | | | | G = 0.014 | G = 0.005 | | | |
| 4945434 | 64645 | 71485395 | C/T | C = 0.14 | C = 0.083 | 0.0063 | 0.55 | C |
| | | | | T = 0.860 | T = 0.917 | | | |
| 4945435 | 64777 | 71485527 | T/C | T = 0.998 | T = 0.996 | 0.853 | 0.55 | T |
| | | | | C = 0.002 | C = 0.004 | | | |
| 11307657 | 64980 | 71485730 | T/— | T = 0.018 | T = 0.009 | 0.724 | 0.51 | T |
| | | | | — = 0.982 | — = 0.991 | | | |
| 5792573 | 64987 | 71485737 | T/— | T = 0.037 | T = 0.01 | 0.306 | 0.24 | T |
| | | | | — = 0.963 | — = 0.990 | | | |
| 1894004 | 65375 | 71486125 | T/C | T = 0.977 | T = 0.984 | 0.537 | 1.43 | C |
| | | | | C = 0.023 | C = 0.016 | | | |
| 12276164 | 65561 | 71486311 | A/G | A = 0.004 | A = 0.002 | 0.826 | 0.50 | A |
| | | | | G = 0.996 | G = 0.998 | | | |
| 4378421 | 67554 | 71488304 | C/T | C = 0.996 | C = 0.996 | 0.959 | 0.90 | C |
| | | | | T = 0.004 | T = 0.004 | | | |
| 7116495 | 67643 | 71488393 | C/T | C = 0 | C = | | | |
| | | | | T = 1 | T = | | | |
| 7101701 | 67713 | 71488463 | A/G | A = 0.483 | A = | | | |
| | | | | G = 0.517 | G = | | | |
| 10736786 | 68832 | 71489582 | T/C | T = 0.959 | T = 0.991 | 0.164 | 4.57 | C |
| | | | | C = 0.041 | C = 0.009 | | | |
| 11608165 | 70184 | 71490934 | T/G | T = 1 | T = 1 | 0.962 | 0.28 | T |
| | | | | G = 0.000 | G = 0.000 | | | |
| 645603 | 70415 | 71491165 | G/A | G = 0.967 | G = 0.97 | 0.829 | 1.10 | A |
| | | | | A = 0.033 | A = 0.030 | | | |
| 661290 | 71572 | 71492322 | A/G | A = 0.186 | A = 0.171 | 0.648 | 0.90 | A |
| | | | | G = 0.814 | G = 0.829 | | | |
| 7122209 | 71732 | 71492482 | T/C | T = 1 | T = 1 | 0.994 | 2.26 | C |
| | | | | C = 0.000 | C = 0.000 | | | |
| 12417471 | 72829 | 71493579 | A/G | A = 0.125 | A = 0.118 | 0.741 | 0.94 | A |
| | | | | G = 0.875 | G = 0.882 | | | |
| 541228 | 73154 | 71493904 | C/G | C = 0.994 | C = 0.996 | 0.935 | 1.29 | G |
| | | | | G = 0.006 | G = 0.004 | | | |
| 12273666 | 73221 | 71493971 | A/G | A = 0.058 | A = 0.047 | 0.511 | 0.81 | A |
| | | | | G = 0.942 | G = 0.953 | | | |
| 2511074 | 74343 | 71495093 | T/C | T = 0.946 | T = 0.975 | 0.176 | 2.19 | C |
| | | | | C = 0.054 | C = 0.025 | | | |
| 3018311 | 74462 | 71495212 | T/G | T = 0.969 | T = 0.993 | 0.151 | 4.57 | G |
| | | | | G = 0.031 | G = 0.007 | | | |
| 3018289 | 74471 | 71495221 | T/C | T = 0.086 | T = 0.069 | 0.375 | 0.78 | T |
| | | | | C = 0.914 | C = 0.931 | | | |
| 679926 | 75494 | 71496244 | A/G | A = 0.923 | A = 0.953 | 0.0831 | 1.70 | G |
| | | | | G = 0.077 | G = 0.047 | | | |
| 567026 | 75510 | 71496260 | G/A | G = 0.943 | G = 0.954 | 0.513 | 1.24 | A |
| | | | | A = 0.057 | A = 0.046 | | | |
| 564294 | 75827 | 71496577 | G/A | G = 1 | G = 1 | 0.988 | 1.14 | A |
| | | | | A = 0.000 | A = 0.000 | | | |
| 678193 | 75831 | 71496581 | T/G | T = 0.133 | T = 0.082 | 0.0189 | 0.58 | T |
| | | | | G = 0.867 | G = 0.918 | | | |
| 677279 | 76027 | 71496777 | T/C | T = 0.979 | T = 0.988 | 0.477 | 1.79 | C |
| | | | | C = 0.021 | C = 0.012 | | | |
| 560777 | 76160 | 71496910 | C/T | C = 0.925 | C = 0.96 | 0.0341 | 1.94 | T |
| | | | | T = 0.075 | T = 0.040 | | | |
| 676721 | 76196 | 71496946 | C/T | C = 0.105 | C = 0.053 | 0.00468 | 0.47 | C |
| | | | | T = 0.895 | T = 0.947 | | | |
| 7106529 | 76378 | 71497128 | A/T | A = 0.999 | A = 0.989 | 0.526 | 0.11 | A |
| | | | | T = 0.001 | T = 0.011 | | | |
| 11602304 | 77306 | 71498056 | G/A | G = 0.999 | G = 0.999 | 0.991 | 0.93 | G |
| | | | | A = 0.001 | A = 0.001 | | | |
| 585228 | 78847 | 71499597 | C/G | C = 0.158 | C = 0.088 | 0.00104 | 0.51 | C |
| | | | | G = 0.842 | G = 0.912 | | | |
| 578957 | 78918 | 71499668 | C/A | C = 0.003 | C = 0.003 | 0.967 | 0.88 | C |
| | | | | A = 0.997 | A = 0.997 | | | |
| 7110215 | 79117 | 71499867 | A/G | A = 0.243 | A = 0.25 | 0.826 | 1.04 | G |
| | | | | G = 0.757 | G = 0.750 | | | |
| 3133233 | 79811 | 71500561 | C/G | C = 0 | C = 0.003 | 0.842 | | G |
| | | | | G = 1 | G = 0.997 | | | |
| 3133230 | 79843 | 71500593 | T/C | T = 0.924 | T = 0.946 | 0.252 | 1.42 | C |
| | | | | C = 0.076 | C = 0.054 | | | |
| 12576024 | 80448 | 71501198 | G/T | G = 1 | G = 1 | 0.992 | 0.88 | G |
| | | | | T = 0.000 | T = 0.000 | | | |
| 674319 | 80949 | 71501699 | C/T | C = 0.962 | C = 0.969 | 0.618 | 1.24 | T |
| | | | | T = 0.038 | T = 0.031 | | | |
| 675185 | 81130 | 71501880 | T/G | T = 0.237 | T = 0.143 | 0.00179 | 0.54 | T |
| | | | | G = 0.763 | G = 0.857 | | | |
| 5792574 | 81452 | 71502202 | —/C | — = 0.093 | — = 0.044 | 0.0467 | 0.45 | — |
| | | | | C = 0.907 | C = 0.956 | | | |
| 12275272 | 82595 | 71503345 | C/T | C = 0.999 | C = 1 | 0.956 | 1.60 | T |
| | | | | T = 0.001 | T = 0.000 | | | |
| 10400327 | 83633 | 71504383 | C/T | C = 0.001 | C = 0.001 | 1 | 1.01 | |
| | | | | T = 0.999 | T = 0.999 | | | |
| 612255 | 84222 | 71504972 | C/T | C = 0.977 | C = 0.987 | 0.376 | 1.74 | T |
| | | | | T = 0.023 | T = 0.013 | | | |
| 7101643 | 84378 | 71505128 | G/A | G = 1 | G = 0.999 | 0.887 | 0.00 | G |
| | | | | A = 0 | A = 0.001 | | | |
| 575871 | 84380 | 71505130 | A/G | A = 0.078 | A = 0.069 | 0.619 | 0.88 | A |
| | | | | G = 0.922 | G = 0.931 | | | |
| 547208 | 85226 | 71505976 | C/T | C = 0.952 | C = 0.965 | 0.479 | 1.38 | T |
| | | | | T = 0.048 | T = 0.035 | | | |
| 2511075 | 85815 | 71506565 | T/C | T = 0.112 | T = 0.055 | 0.0283 | 0.46 | T |
| | | | | C = 0.888 | C = 0.945 | | | |
| 642573 | 86412 | 71507162 | C/G | C = 0.95 | C = 0.976 | 0.0589 | 2.14 | G |
| | | | | G = 0.050 | G = 0.024 | | | |
| 482197 | 86805 | 71507555 | G/A | G = 0.982 | G = 0.991 | 0.403 | 1.98 | A |
| | | | | A = 0.018 | A = 0.009 | | | |
| 656640 | 87268 | 71508018 | T/C | T = 0.391 | T = 0.348 | 0.194 | 0.83 | T |
| | | | | C = 0.609 | C = 0.652 | | | |
| 671681 | 88370 | 71509120 | C/T | C = 0.929 | C = 0.958 | 0.0747 | 1.75 | T |
| | | | | T = 0.071 | T = 0.042 | | | |
| 541022 | 88614 | 71509364 | A/G | A = 0.929 | A = 0.964 | 0.0379 | 1.99 | G |
| | | | | G = 0.071 | G = 0.036 | | | |
| 951586 | 89223 | 71509973 | A/G | A = 0.003 | A = 0.002 | 0.86 | 0.46 | A |
| | | | | G = 0.997 | G = 0.998 | | | |
| 2511076 | 89385 | 71510135 | G/A | G = 0.778 | G = 0.742 | 0.263 | 0.82 | G |
| | | | | A = 0.222 | A = 0.258 | | | |
| 11235432 | 89500 | 71510250 | G/C | G = 0.997 | G = 0.997 | 0.981 | 0.94 | G |
| | | | | C = 0.003 | C = 0.003 | | | |
| 3018308 | 89502 | 71510252 | T/C | T = 0.629 | T = 0.633 | 0.898 | 1.02 | C |
| | | | | C = 0.371 | C = 0.367 | | | |
| 11606798 | 89929 | 71510679 | G/C | G = 0.997 | G = 0.994 | 0.768 | 0.58 | G |
| | | | | C = 0.003 | C = 0.006 | | | |
| 1791544 | 90515 | 71511265 | C/T | C = 0.102 | C = 0.051 | 0.011 | 0.48 | C |
| | | | | T = 0.898 | T = 0.949 | | | |
| 3018304 | 90659 | 71511409 | C/A | C = 0.996 | C = 0.994 | 0.838 | 0.70 | C |
| | | | | A = 0.004 | A = 0.006 | | | |
| 10751193 | 90914 | 71511664 | A/C | A = 0.738 | A = 0.708 | 0.381 | 0.86 | A |
| | | | | C = 0.262 | C = 0.292 | | | |
| 4945470 | 91594 | 71512344 | C/T | C = 0.999 | C = 0.999 | 0.947 | 0.68 | C |
| | | | | T = 0.001 | T = 0.001 | | | |
| 3018291 | 91603 | 71512353 | A/C | A = 0.994 | A = 0.999 | 0.683 | 3.72 | C |
| | | | | C = 0.006 | C = 0.001 | | | |
| 2511120 | 91769 | 71512519 | A/G | A = 0.989 | A = 0.997 | 0.493 | 3.26 | G |
| | | | | G = 0.011 | G = 0.003 | | | |
| 671132 | 92005 | 71512755 | G/A | G = 0.043 | G = 0.041 | 0.898 | 0.95 | G |
| | | | | A = 0.957 | A = 0.959 | | | |
| 4945475 | 93335 | 71514085 | G/C | G = 0.998 | G = 0.999 | 0.922 | 1.79 | C |
| | | | | C = 0.002 | C = 0.001 | | | |
| 3018292 | 93443 | 71514193 | T/G | T = 1 | T = 1 | 0.993 | 1.38 | G |
| | | | | G = 0.000 | G = 0.000 | | | |
| 642618 | 93751 | 71514501 | C/T | C = 0.1 | C = 0.051 | 0.00594 | 0.48 | C |
| | | | | T = 0.900 | T = 0.949 | | | |
| 552966 | 93775 | 71514525 | A/C | A = 0.159 | A = 0.098 | 0.0096 | 0.57 | A |
| | | | | C = 0.841 | C = 0.902 | | | |
| 6592459 | 94351 | 71515101 | T/G | T = 0.003 | T = 0.004 | 0.903 | 1.63 | G |
| | | | | G = 0.997 | G = 0.996 | | | |
| 607446 | 94810 | 71515560 | C/T | C = 0.142 | C = 0.084 | 0.00611 | 0.55 | C |
| | | | | T = 0.858 | T = 0.916 | | | |
| 607070 | 94856 | 71515606 | A/G | A = 0 | A = 0.001 | 0.972 | | G |
| | | | | G = 1 | G = 0.999 | | | |
| 10713307 | 95893 | 71516643 | C/— | C = 0.662 | C = | | | |
| | | | | — = 0.338 | — = | | | |
| 3018302 | 96500 | 71517250 | T/G | T = 0.233 | T = 0.174 | 0.0339 | 0.69 | T |
| | | | | G = 0.767 | G = 0.826 | | | |
| 3750909 | 97587 | 71518337 | G/C | G = 0.998 | G = 0.998 | 0.986 | 0.93 | G |
| | | | | C = 0.002 | C = 0.002 | | | |
| 3018301 | 97629 | 71518379 | A/G | A = 0.268 | A = 0.167 | 0.000211 | 0.55 | A |
| | | | | G = 0.732 | G = 0.833 | | | |
| 2511114 | 97705 | 71518455 | C/T | C = 0.921 | C = 0.959 | 0.0268 | 1.99 | T |
| | | | | T = 0.079 | T = 0.041 | | | |
| 12270166 | 97967 | 71518717 | A/G | A = | A = 0.193 | | | |
| | | | | G = | G = 0.807 | | | |
| 12270241 | 98126 | 71518876 | G/A | G = 0.999 | G = 0.999 | 0.948 | 0.73 | G |
| | | | | A = 0.001 | A = 0.001 | | | |
| 11606587 | 98422 | 71519172 | A/G | A = 0.999 | A = 0.999 | 0.989 | 1.06 | G |
| | | | | G = 0.001 | G = 0.001 | | | |
| 686340 | 98770 | 71519520 | G/C | G = 0.972 | G = 0.994 | 0.0558 | 4.34 | C |
| | | | | C = 0.028 | C = 0.006 | | | |
| 548961 | 99445 | 71520195 | G/A | G = 0.153 | G = 0.093 | 0.0091 | 0.57 | G |
| | | | | A = 0.847 | A = 0.907 | | | |
| 549032 | 99467 | 71520217 | C/A | C = 0.002 | C = 0.001 | 0.943 | 0.56 | C |
| | | | | A = 0.998 | A = 0.999 | | | |
| 575831 | 100104 | 71520854 | A/G | A = 0.056 | A = 0.043 | 0.393 | 0.75 | A |
| | | | | G = 0.944 | G = 0.957 | | | |
| 575878 | 100121 | 71520871 | A/T | A = 0.001 | A = 0 | 0.948 | 0.00 | A |
| | | | | T = 0.999 | T = 1 | | | |
| 577435 | 100239 | 71520989 | T/C | T = 0.981 | T = 0.985 | 0.717 | 1.26 | C |
| | | | | C = 0.019 | C = 0.015 | | | |
| 579320 | 100512 | 71521262 | G/T | G = 0.092 | G = 0.048 | 0.0151 | 0.50 | G |
| | | | | T = 0.908 | T = 0.952 | | | |
| 495567 | 101046 | 71521796 | C/T | C = 0.11 | C = 0.052 | 0.0205 | 0.44 | C |
| | | | | T = 0.890 | T = 0.948 | | | |
| 636946 | 101267 | 71522017 | C/T | C = 0.999 | C = 0.998 | 0.897 | 0.61 | C |
| | | | | T = 0.001 | T = 0.002 | | | |
| 493065 | 102487 | 71523237 | A/G | A = 0.177 | A = 0.096 | 0.000749 | 0.49 | A |
| | | | | G = 0.823 | G = 0.904 | | | |
| 597513 | 102980 | 71523730 | A/T | A = 0.094 | A = 0.0650 | 0.257 | 0.67 | A |
| | | | | T = 0.906 | T = 0.935 | | | |
| 598835 | 103285 | 71524035 | T/C | T = 0.927 | T = 0.957 | 0.0701 | 1.74 | C |
| | | | | C = 0.073 | C = 0.043 | | | |
| 10683614 | 103359 | 71524109 | —/TAGT | — = 0.027 | — = 0.005 | 0.154 | 0.16 | — |
| | | | | TAGT = 0.973 | TAGT = 0.995 | | | |
| 610004 | 103497 | 71524247 | T/C | T = 0.912 | T = 0.955 | 0.0119 | 2.03 | C |
| | | | | C = 0.088 | C = 0.045 | | | |
| 610041 | 103526 | 71524276 | A/G | A = 0.127 | A = 0.07 | 0.00619 | 0.52 | A |
| | | | | G = 0.873 | G = 0.930 | | | |
| 673478 | 104662 | 71525412 | T/C | T = 0.842 | T = 0.896 | 0.0173 | 1.61 | C |
| | | | | C = 0.158 | C = 0.104 | | | |
| 670802 | 105226 | 71525976 | T/G | T = 0.128 | T = 0.082 | 0.0238 | 0.61 | T |
| | | | | G = 0.872 | G = 0.918 | | | |
| 505041 | 105950 | 71526700 | T/A | T = 0.006 | T = 0.003 | 0.766 | 0.53 | T |
| | | | | A = 0.994 | A = 0.997 | | | |
| 2511116 | 107718 | 71528468 | C/T | C = 0.107 | C = 0.042 | 0.0154 | 0.37 | C |
| | | | | T = 0.893 | T = 0.958 | | | |
| 628025 | 107909 | 71528659 | A/C | A = 0.104 | A = 0.078 | 0.3 | 0.73 | A |
| | | | | C = 0.896 | C = 0.922 | | | |
| 517837 | 107917 | 71528667 | C/T | C = 0.902 | C = 0.935 | 0.075 | 1.56 | T |
| | | | | T = 0.098 | T = 0.065 | | | |
| 615000 | 108510 | 71529260 | T/G | T = 0.19 | T = 0.086 | 0.0000392 | 0.40 | T |
| | | | | G = 0.810 | G = 0.914 | | | |
| 482013 | 109520 | 71530270 | C/T | C = 0.122 | C = 0.077 | 0.0251 | 0.60 | C |
| | | | | T = 0.878 | T = 0.923 | | | |
| 693391 | 109676 | 71530426 | T/G | T = 1 | T = 1 | 0.98 | 1.70 | G |
| | | | | G = 0.000 | G = 0.000 | | | |
| 2511079 | 109712 | 71530462 | T/C | T = 0.934 | T = 0.966 | 0.0397 | 1.99 | C |
| | | | | C = 0.066 | C = 0.034 | | | |
| 2250866 | 110071 | 71530821 | T/C | T = 0.15 | T = 0.085 | 0.00294 | 0.52 | T |
| | | | | C = 0.850 | C = 0.915 | | | |
| 2508860 | 110610 | 71531360 | A/G | A = 0.094 | A = 0.072 | 0.29 | 0.75 | A |
| | | | | G = 0.906 | G = 0.928 | | | |
| 7483267 | 110757 | 71531507 | A/G | A = 0.116 | A = 0.12 | 0.838 | 1.05 | G |
| | | | | G = 0.884 | G = 0.880 | | | |
| 2511078 | 110758 | 71531508 | G/A | G = 0.757 | G = 0.75 | 0.793 | 0.96 | G |
| | | | | A = 0.243 | A = 0.250 | | | |
| 2508859 | 110923 | 71531673 | T/G | T = 1 | T = 1 | 0.987 | 170.03 | G |
| | | | | G = 0.000 | G = 0.000 | | | |
| 2508858 | 110963 | 71531713 | C/G | C = 0.101 | C = 0.057 | 0.0243 | 0.54 | C |
| | | | | G = 0.899 | G = 0.943 | | | |
| 11235435 | 111245 | 71531995 | T/G | T = 0 | T = 0.001 | 0.954 | | G |
| | | | | G = 1 | G = 0.999 | | | |
| 11235436 | 111437 | 71532187 | A/G | A = 0 | A = 0.002 | 0.89 | | G |
| | | | | G = 1 | G = 0.998 | | | |
| 639435 | 112174 | 71532924 | A/C | A = 1 | A = 1 | 0.959 | 0.15 | A |
| | | | | C = 0.000 | C = 0.000 | | | |
| 12285624 | 112646 | 71533396 | A/G | A = 0.505 | A = 0.51 | 0.857 | 1.02 | G |
| | | | | G = 0.495 | G = 0.490 | | | |
| NUMA1-AD | 112784 | 71533534 | G/T | G = 0.005 | G = 0.004 | 0.908 | 0.79 | G |
| | | | | T = 0.995 | T = 0.996 | | | |
| 624363 | 113275 | 71534025 | T/C | T = 0.002 | T = 0.002 | 0.995 | 1.06 | C |
| | | | | C = 0.998 | C = 0.998 | | | |
| NUMA1-AE | 113614 | 71534364 | T/C | T = 0.574 | T = 0.583 | 0.779 | 1.04 | C |
| | | | | C = 0.426 | C = 0.417 | | | |
| 1053573 | 113965 | 71534715 | G/T | G = 0.001 | G = 0 | 0.934 | 0.00 | G |
| | | | | T = 0.999 | T = 1 | | | |
| 1053511 | 114095 | 71534845 | C/T | C = 1 | C = 1 | 1 | 1.00 | |
| | | | | T = 0.000 | T = 0.000 | | | |
| 1063863 | 114125 | 71534875 | G/A | G = 1 | G = 1 | 0.972 | 0.61 | G |
| | | | | A = 0.000 | A = 0.000 | | | |
| 12137 | 114213 | 71534963 | C/T | C = 0.995 | C = 0.99 | 0.624 | 0.55 | C |
| | | | | T = 0.005 | T = 0.010 | | | |
| 4365081 | 114278 | 71535028 | A/G | A = 0.002 | A = 0.002 | 0.983 | 1.16 | G |
| | | | | G = 0.998 | G = 0.998 | | | |
| 4466868 | 114321 | 71535071 | G/C | G = 0.999 | G = 1 | 0.898 | | C |
| | | | | C = 0.001 | C = 0 | | | |
| 3750911 | 114465 | 71535215 | A/G | A = 0.004 | A = 0.004 | 0.985 | 1.06 | G |
| | | | | G = 0.996 | G = 0.996 | | | |
| 510925 | 115058 | 71535808 | T/C | T = 0.099 | T = 0.099 | 0.996 | 1.00 | T |
| | | | | C = 0.901 | C = 0.901 | | | |
| 595062 | 115193 | 71535943 | A/G | A = 0.077 | A = 0.059 | 0.302 | 0.75 | A |
| | | | | G = 0.923 | G = 0.941 | | | |
| 1053443 | 115433 | 71536183 | C/T | C = 0.997 | C = 1 | 0.757 | 4.73 | T |
| | | | | T = 0.003 | T = 0.000 | | | |
| 542752 | 116202 | 71536952 | A/T | A = 0.118 | A = 0.087 | 0.298 | 0.71 | A |
| | | | | T = 0.882 | T = 0.913 | | | |
| 3897579 | 116328 | 71537078 | T/C | T = 0.001 | T = 0.001 | 0.985 | 1.62 | C |
| | | | | C = 0.999 | C = 0.999 | | | |
| 11235437 | 116812 | 71537562 | T/C | T = 0.001 | T = 0.001 | 0.949 | 0.41 | T |
| | | | | C = 0.999 | C = 0.999 | | | |
| 2508856 | 117201 | 71537951 | C/T | C = 0.926 | C = 0.939 | 0.448 | 1.23 | T |
| | | | | T = 0.074 | T = 0.061 | | | |
| 5792575 | 117565 | 71538315 | A/— | A = | A = 0.996 | | | |
| | | | | — = | — = 0.004 | | | |
| 659513 | 117969 | 71538719 | G/A | G = 0.949 | G = 0.976 | 0.0509 | 2.20 | A |
| | | | | A = 0.051 | A = 0.024 | | | |
| 10898820 | 118150 | 71538900 | A/G | A = 0.685 | A = 0.668 | 0.583 | 0.93 | A |
| | | | | G = 0.315 | G = 0.332 | | | |
| 2276397 | 127729 | 71548479 | C/T | C = 0.014 | C = 0.008 | 0.55 | 0.57 | C |
| | | | | T = 0.986 | T = 0.992 | | | |
| 3750908 | 127959 | 71548709 | C/T | C = 0.089 | C = 0.058 | 0.0865 | 0.63 | C |
| | | | | T = 0.911 | T = 0.942 | | | |
| 3793938 | 128691 | 71549441 | C/T | C = 0.915 | C = 0.948 | 0.0698 | 1.69 | T |
| | | | | T = 0.085 | T = 0.052 | | | |
| 602285 | 129086 | 71549836 | C/G | C = 1 | C = 1 | 0.999 | 1.01 | G |
| | | | | G = 0.000 | G = 0.000 | | | |
| 2276396 | 129463 | 71550213 | G/C | G = 0.108 | G = 0.0640 | 0.0188 | 0.56 | G |
| | | | | C = 0.892 | C = 0.936 | | | |
| 2276395 | 129900 | 71550650 | T/C | T = 0.001 | T = 0.002 | 0.902 | 3.67 | C |
| | | | | C = 0.999 | C = 0.998 | | | |
| 1806778 | 136610 | 71557360 | T/C | T = 0.955 | T = 0.969 | 0.341 | 1.44 | C |
| | | | | C = 0.045 | C = 0.031 | | | |
| 4073394 | 137797 | 71558547 | A/G | A = 0.46 | A = 0.422 | 0.23 | 0.86 | A |
| | | | | G = 0.540 | G = 0.578 | | | |
| 471547 | 151737 | 71572487 | G/T | G = 0.488 | G = 0.48 | 0.842 | 0.97 | G |
| | | | | T = 0.512 | T = 0.520 | | | |
| 606136 | 152130 | 71572880 | A/G | A = 0.559 | A = 0.535 | 0.447 | 0.91 | A |
| | | | | G = 0.441 | G = 0.465 | | | |
| 605241 | 152332 | 71573082 | T/C | T = 0.005 | T = 0.002 | 0.712 | 0.35 | T |
| | | | | C = 0.995 | C = 0.998 | | | |
| 686063 | 153789 | 71574539 | G/A | G = 0.003 | G = 0.006 | 0.742 | 2.10 | A |
| | | | | A = 0.997 | A = 0.994 | | | |
| 685749 | 153813 | 71574563 | T/C | T = 0.033 | T = 0.038 | 0.837 | 1.15 | C |
| | | | | C = 0.967 | C = 0.962 | | | |
| 533207 | 153844 | 71574594 | A/C | A = 0.923 | A = 0.919 | 0.811 | 0.94 | A |
| | | | | C = 0.077 | C = 0.081 | | | |
| 476753 | 188612 | 71609362 | A/G | A = 0.077 | A = 0.07 | 0.71 | 0.90 | A |
| | | | | G = 0.923 | G = 0.930 | | | |
| NUMA1-AF | 191149 | 71611899 | G/T | G = 0.963 | G = 0.974 | 0.398 | 1.46 | T |
| | | | | T = 0.037 | T = 0.026 | | | |
| 11278712 | 34468-34472 | 71455218\hat{ } | —/ | — = 0.901 | — = 0.954 | 0.00321 | 2.24 | GTCAAC |
| | | 71455222 | GTCAAC | GTCAAC = | GTCAAC = | | | |
| | | | | 0.099 | 0.046 | | | |
| 3831387 | 38627-38628 | 71459377\hat{ } | CA/— | CA = 0.04 | CA = 0.013 | 0.067 | 0.32 | CA |
| | | 71459378 | | — = 0.960 | — = 0.987 | | | |

[0319] FIG. 1D shows proximal SNPs in and around the NUMA1 region for females. The position of each SNP on the chromosome is presented on the x-axis. The y-axis gives the negative logarithm (base 10) of the p-value comparing the estimated allele in the case group to that of the control group. The minor allele frequency of the control group for each SNP designated by an X or other symbol on the graphs in FIG. 1D can be determined by consulting Table 30. By proceeding down the Table from top to bottom and across the graphs from left to right the allele frequency associated with each symbol shown can be determined.

[0320] To aid the interpretation, multiple lines have been added to the graph. The broken horizontal lines are drawn at two common significance levels, 0.05 and 0.01. The vertical broken lines are drawn every 20 kb to assist in the interpretation of distances between SNPs. Two other lines are drawn to expose linear trends in the association of SNPs to the disease. The light gray line (or generally bottom-most curve) is a nonlinear smoother through the data points on the graph using a local polynomial regression method (W. S. Cleveland, E. Grosse and W. M. Shyu (1992) Local regression models. Chapter 8 of Statistical Models in S eds J. M. Chambers and T. J. Hastie, Wadsworth & Brooks/Cole.). The black line provides a local test for excess statistical significance to identify regions of association. This was created by use of a 10 kb sliding window with 1 kb step sizes. Within each window, a chi-square goodness of fit test was applied to compare the proportion of SNPs that were significant at a test wise level of 0.01, to the proportion that would be expected by chance alone (0.05 for the methods used here). Resulting p-values that were less than 10⁻⁸ were truncated at that value.

[0321] Finally, the gene or genes present in the loci region of the proximal SNPs as annotated by Locus Link (http address: www.ncbi.nlm.nih.gov/LocusLink/) are provided on the graph. The exons and introns of the genes in the covered region are plotted below each graph at the appropriate chromosomal positions. The gene boundary is indicated by the broken horizontal line. The exon positions are shown as thick, unbroken bars. An arrow is place at the 3′ end of each gene to show the direction of transcription.

[0322] Additional Genotyping

[0323] Three additional NUMA1 region SNPs were genotyped in the discovery cohort. The discovery cohort is described in Example 1. The three SNPs (rs1894003, rs675185, and rs615000) map to the following respective locations within the NUMA1 region: 3'UTR of LOC220074, intron of NUMA1, and intron of LOC220074. All three of the SNPs (rs1894003, rs675185, and rs615000) were found to be significantly associated with breast cancer with a p-value of 0.00833, 0.0465 and 0.00648, respectively. See Table 26.

[0324] The methods used to verify and genotype the three proximal SNPs of Table 26 are the same methods described in Examples 1 and 2 herein. The PCR primers and extend primers used in these assays are provided in Table 24 and Table 25, respectively.

TABLE 31

| | | |
|---|---|---|
| dbSNP rs# | Forward PCR primer | Reverse PCR primer |

| | | |
|---|---|---|
| 1894003 | ACGTTGGATGGCCTAGCCATGATTTCCTAC | ACGTTGGATGTTGACCCTCTGGTCCTGC |
| 675185 | ACGTTGGATGCCCGTCTCTGGGGAAAAAAA | ACGTTGGATGCCCAGCCTATATCCTGCTTT |
| 615000 | ACGTTGGATGATTTTGGCAACTTAGAAGTC | ACGTTGGATGGCCTCCATTCACTCTTGAAC |

[0325] TABLE 32

| dbSNP rs# | Extend Primer | Term Mix |
|---|---|---|
| 1894003 | TGTAAACCACCTGCTCAGAC | ACT |
| 675185 | ATGGGGAAATACTCAAGAAA | CT |
| 615000 | CCTGGAGGCAGAAGCCAGAT | ACT |

[0326] Table 26, below, shows the case and control allele frequencies along with the p-values for additional SNPs genotyped. The disease associated allele of column 4 is in bold. The chromosome positions provided correspond to NCBI's Build 34.

TABLE 33
Genotyping Results

| | Position in | | | Amino | | | | | |
|---|---|---|---|---|---|---|---|---|---|
| | SEQ ID | Chromosome | Alleles | Acid | | AF F | | Odds | Breast Cancer |
| dbSNP rs# | NO: 4 | Position | (A1/A2) | Change | AF F case | control | p-value | Ratio | Assoc. Allele |
| 1894003 | 55834 | 71476584 | T/C | | T = 0.086 | T = 0.045 | 0.00833 | 0.504 | T |
| | | | | | C = 0.914 | C = 0.955 | | | |
| 675185 | 81130 | 71501880 | T/G | | T = 0.076 | T = 0.046 | 0.0465 | 0.587 | T |
| | | | | | G = 0.924 | G = 0.954 | | | |
| 615000 | 108510 | 71529260 | T/G | | T = 0.085 | T = 0.043 | 0.00648 | 0.486 | T |
| | | | | | G = 0.915 | G = 0.957 | | | |

### Example 8

[0327] Meta Analysis of Incident SNPs

[0328] Meta-analysis was performed of five of the incident SNPs disclosed in Table 3 (ICAM region (ICAM_SNP), MAPK10 (rs1541998), KIAA0861 (rs2001449), NUMA1 region (rs673478) and GALE region (rs4237)) based on genotype results provided in Table 6B. FIGS. 2A-2D depict odds ratios for the discovery samples and replication samples (see Example 3) individually, and the combined meta analysis odds ratio for the named SNP. The boxes are centered over the odds ratio for each sample, with the size of the box correlated to the contribution of each sample to the combined meta analysis odds ratio. The lines extending from each box are the 95% confidence interval values. The diamond is centered over the combined meta analysis odds ratio with the ends of the diamond depicting the 95% confidence interval values. The meta-analysis further illustrates the strong association each of the incident SNPs has with breast cancer across multiple case and control samples.

[0329] The subjects available for discovery from Germany included 272 cases and 276 controls. The subjects available for replication from Australia included 190 breast cancer cases and 190 controls. Meta analyses, combining the results of the German discovery sample and the Australian replication sample, were carried out using a random effects (DerSimonian-Laird) procedure.

### Example 9

### Description of development of predictive breast cancer models

[0330] The five SNPs reported in Example 3 were identified as being significantly associated with breast cancer according to the replication analysis discussed therein. These five SNPs are a subset of the panel of SNPs associated with breast cancer in the German chort referenced in Example 1 and reported in provisional patent application No. 60/429,136 filed Nov. 25, 2002 and provisional patent application No. 60/490,234 filed Jul. 24, 2003, having attorney docket number 524593004100 and 524593004101, respectively.

[0331] The clinical importance of these SNPs was estimated by combining them into a single logistic regression model. The coefficients of the model were used to estimate penetrance, relative risk and odds ratio values for estimating a subject's risk of having or developing breast cancer according to the subject's genotype. Penetrance is a probability that an individual has or will have breast cancer given their genotype (e.g., a value of 0.01 in the tables is equal to a 1% chance of having or developing breast cancer). The relative risk of breast cancer is based upon penetrance values, and is expressed in two forms. One form, noted as RR in the tables below, is expressed as a risk with respect to the lowest risk group (e.g., the most protected group being the 00000 genotype listed in Table 33). The other form is expressed as a risk with respect to a population average risk of breast cancer, which is noted as RR(Pop) in Table 35 below. Both of these expressions of relative risk are useful to a clinician for assessing risk of breast cancer in an individual and targeting appropriate detection, prevention and/or treatment regimens to the subject. Both expressions of relative risk also are useful to an insurance company to assess population risks of breast cancer (e.g., for developing actuarial tables), where individual genotypes often are provided to the company on an anonymous basis. Odds ratios are the odds one group has or will develop breast cancer with respect to another group, the other group often being the most protective group or the group having a population average risk of breast cancer. Relative risk often is a more reliable assessment of risk in comparison to an odds ratio when the disease or condition at issue is more prevalent.

[0332] To fit the single logistic model, all cases and controls from the German and Australian samples were used (see Examples 1 and 3, respectively). Controls were coded as 0 and cases were coded as 1. Based on the genotype penetrance estimates of each SNP (Table 31), GP01.025495354 (rs4237), GP03.197942797 (rs2001449), GP11.079035103 (rs673478) were modeled as additive by coding the genotypes 0, 1, or 2 for the low risk homozygote, the heterozygote, or high risk homozygote, respectively. The SNP FCH.0994 (ICAM_SNP1) was modeled as recessive coding the genotypes 0, 0, or 2 for the low risk homozygote, heterozygote, or high risk homozygote, respectively. The SNP GP04.091348915 (rs1541998) was modeled as dominant coding the genotypes 0, 2, or 2 for the low risk homozygote, the heterozygote, or high risk homozygote, respectively. Table 31 summarizes this analysis.

TABLE 31

| SNP: | | Case | | Control | | P(D\|G) | |
|---|---|---|---|---|---|---|---|
| Genotype | N | (N = 254) | | (N = 268) | | (%) | P-value |
| ICAM_SNP1: | | | | | | | |
| CC | 497 | 45% | (103) | 32% | (85) | 4.140 | 0.006210 |
| CT | | 42% | (98) | 47% | (126) | 2.700 | |
| TT | | 13% | (30) | 21% | (13) | 1.910 | |
| rs4237: | | | | | | | |
| AA | 494 | 34% | (79) | 29% | (75) | 3.550 | 0.186000 |
| AG | | 49% | (113) | 48% | (126) | 3.040 | |
| GG | | 17% | (40) | 23% | (61) | 2.240 | |
| rs2001449: | | | | | | | |
| GG | 508 | 46% | (112) | 60% | (158) | 2.280 | 0.002930 |
| GC | | 48% | (117) | 36% | (94) | 3.940 | |
| CC | | 7% | (17) | 4% | (10) | 5.300 | |
| rs673478: | | | | | | | |
| TT | 509 | 84% | (206) | 91% | (240) | 2.800 | 0.040700 |
| TC | | 14% | (35) | 9% | (25) | 4.490 | |
| CC | | 1% | (3) | 0% | (0) | 100.00 | |
| rs1541998: | | | | | | | |
| CC | 493 | 5% | (12) | 4% | (10) | 3.710 | 0.012100 |
| CT | | 36% | (87) | 24% | (61) | 4.370 | |
| TT | | 59% | (143) | 72% | (180) | 2.490 | |

[0333] Based on this coding, there are a total of 108 unique genotype codes from the 243 unique five SNP genotypes. The relationship between the five SNP genotypes and the case-control status was fit using logistic regression. Many models were fit and compared including the five SNPs and all possible interaction among SNPs and study center. Only statistically significant terms from this complete model were included in the final model, shown in Table 32.

TABLE 32

| | Estimate | Std. Error | z value | Pr(>\|z\|) |
|---|---|---|---|---|
| (Intercept) | −1.34446 | 0.25972 | −5.177 | 2.26e−07 |
| FCH.0994 | 0.77607 | 0.19835 | 3.913 | 9.13e−05 |
| 4237 | 0.54525 | 0.17666 | 3.086 | 0.002025 |
| 2001449 | 0.60383 | 0.28487 | 2.120 | 0.034033 |
| 1541998 | 0.22051 | 0.07849 | 2.809 | 0.004963 |
| 673478 | 0.59961 | 0.21737 | 2.758 | 0.005807 |
| FCH.0994c: 4237 | −0.52636 | 0.14516 | −3.626 | 0.000288 |
| FCH.0994c: 2001449 | −0.35613 | 0.24503 | −1.453 | 0.146113 |
| 4237c: 2001449 | −0.15685 | 0.20191 | −0.777 | 0.437257 |
| FCH.0994c: 4237c2001449 | 0.41305 | 0.18391 | 2.246 | 0.024705 |

Null deviance: 1136.7 on 820 degrees of freedom
Residual deviance: 1069.6 on 811 degrees of freedom
AIC: 1089.6

[0334] The penetrance was calculated for each of the 108 unique genotype codes using this model and an assumed disease prevalence of 0.03 (prev), the cumulative incidence for the age range of the sample in question. This was calculated from the logistic model as follows:
penetrance=exp(y+adj)/(1+exp(y+adj))
[0335] where
[0336] y=1/(1+exp(−1.344+0.776*A+0.545*B+0.604*C+0.221*D+0.600*E−0.526*A*B−0.356*A*C-0.157*B*C+0.413*A*B*C))=
[0337] and
[0338] adj=1n(prev/(1−prev)*freq(case)/(1−freq(case)).
   Here A, B, C, D, and E refer to the genotype codes for the SNPs FCH.0994, 4237, 2001449, 1541998, and 673478, respectively.

[0339] Table 33 summarizes statistics of interest for each genotype code. “Geno” shows each genotype code with the five integer codes formatted as an integer string. “N Case” and “N Control” is the number of cases and controls with the specified code, respectively. “Frequency” is the expected percent of individuals in the population having that code calculated as the average of the case and control frequencies weighted by the probability of disease in this sample (0.03). “OR” is the odds ratio comparing the odds of the specified code to the odds of the most protective code (00000) using the parameter estimates from the logistic regression model. “OR (Frq)” is an odds ratio estimated using the frequency of cases and control with the specified genotype code and the most protective code. “RR” is the relative risk comparing the probability of disease of the specified code to the probability of disease of the most protective code. “Penetrance” is the probability of disease given the genotype code, followed by “Lower” and “Upper” which give the 95% confidence interval for the penetrance. As can be seen by the ratios for OR and RR, the 00000 genotype was the most protective against breast cancer occurrence.

TABLE 33

| | | | | | | | | Confidence Interval | |
|---|---|---|---|---|---|---|---|---|---|
| Geno | N Case | N Control | Frequency | OR | OR (Frq) | RR | Penetrance | Lower | Upper |
| 00000 | 6 | 26 | 5.94% | 1.00 | 1.00 | 1.00 | 0.010 | 0.007 | 0.014 |
| 00001 | 0 | 3 | 0.68% | 1.75 | 0.00 | 1.74 | 0.017 | 0.011 | 0.029 |
| 00002 | 0 | 0 | 0.00% | 3.08 | | 3.01 | 0.030 | 0.013 | 0.069 |
| 00020 | 3 | 9 | 2.06% | 1.61 | 1.44 | 1.60 | 0.016 | 0.011 | 0.023 |
| 00021 | 0 | 3 | 0.68% | 2.83 | 0.00 | 2.78 | 0.028 | 0.017 | 0.047 |
| 00022 | 0 | 0 | 0.00% | 4.97 | | 4.78 | 0.048 | 0.021 | 0.108 |
| 00100 | 9 | 20 | 4.60% | 1.67 | 1.95 | 1.66 | 0.017 | 0.012 | 0.023 |
| 00101 | 2 | 1 | 0.24% | 2.93 | 8.67 | 2.87 | 0.029 | 0.018 | 0.047 |
| 00102 | 0 | 0 | 0.00% | 5.13 | | 4.93 | 0.050 | 0.022 | 0.110 |
| 00120 | 7 | 6 | 1.41% | 2.69 | 5.06 | 2.65 | 0.027 | 0.018 | 0.038 |
| 00121 | 0 | 0 | 0.00% | 4.73 | | 4.56 | 0.046 | 0.028 | 0.075 |
| 00122 | 0 | 0 | 0.00% | 8.29 | | 7.72 | 0.078 | 0.034 | 0.168 |
| 00200 | 1 | 4 | 0.91% | 2.78 | 1.08 | 2.74 | 0.027 | 0.018 | 0.042 |
| 00201 | 0 | 0 | 0.00% | 4.88 | | 4.70 | 0.047 | 0.027 | 0.082 |
| 00202 | 0 | 0 | 0.00% | 8.57 | | 7.96 | 0.080 | 0.034 | 0.178 |
| 00220 | 1 | 1 | 0.23% | 4.50 | 4.33 | 4.34 | 0.044 | 0.027 | 0.070 |
| 00221 | 1 | 0 | 0.01% | 7.89 | | 7.38 | 0.074 | 0.041 | 0.129 |
| 00222 | 0 | 0 | 0.00% | 13.83 | | 12.25 | 0.123 | 0.052 | 0.263 |
| 01000 | 24 | 47 | 10.84% | 1.26 | 2.21 | 1.26 | 0.013 | 0.010 | 0.016 |
| 01001 | 3 | 1 | 0.25% | 2.21 | 13.00 | 2.18 | 0.022 | 0.014 | 0.034 |
| 01002 | 0 | 0 | 0.00% | 3.87 | | 3.77 | 0.038 | 0.017 | 0.083 |
| 01020 | 18 | 22 | 5.12% | 2.03 | 3.55 | 2.01 | 0.020 | 0.015 | 0.027 |
| 01021 | 4 | 4 | 0.94% | 3.57 | 4.33 | 3.48 | 0.035 | 0.022 | 0.055 |
| 01022 | 0 | 0 | 0.00% | 6.26 | | 5.94 | 0.060 | 0.027 | 0.129 |
| 01100 | 21 | 33 | 7.64% | 2.10 | 2.76 | 2.08 | 0.021 | 0.017 | 0.026 |
| 01101 | 2 | 4 | 0.92% | 3.69 | 2.17 | 3.59 | 0.036 | 0.024 | 0.055 |
| 01102 | 0 | 0 | 0.00% | 6.47 | | 6.13 | 0.062 | 0.028 | 0.130 |
| 01120 | 15 | 6 | 1.47% | 3.39 | 10.83 | 3.31 | 0.033 | 0.025 | 0.045 |
| 01121 | 0 | 0 | 0.00% | 5.95 | | 5.67 | 0.057 | 0.036 | 0.089 |
| 01122 | 0 | 0 | 0.00% | 10.44 | | 9.54 | 0.096 | 0.044 | 0.198 |
| 01200 | 5 | 4 | 0.94% | 3.51 | 5.42 | 3.42 | 0.034 | 0.023 | 0.050 |
| 01201 | 0 | 1 | 0.23% | 6.15 | 0.00 | 5.85 | 0.059 | 0.035 | 0.097 |
| 01202 | 0 | 0 | 0.00% | 10.79 | | 9.82 | 0.099 | 0.044 | 0.209 |
| 01220 | 1 | 0 | 0.01% | 5.66 | | 5.41 | 0.054 | 0.035 | 0.083 |
| 01221 | 0 | 0 | 0.00% | 9.93 | | 9.12 | 0.092 | 0.054 | 0.152 |
| 01222 | 0 | 0 | 0.00% | 17.42 | | 14.95 | 0.150 | 0.067 | 0.304 |
| 02000 | 22 | 39 | 9.01% | 1.59 | 2.44 | 1.58 | 0.016 | 0.012 | 0.021 |
| 02001 | 2 | 1 | 0.24% | 2.78 | 8.67 | 2.73 | 0.027 | 0.017 | 0.043 |
| 02002 | 1 | 0 | 0.01% | 4.88 | | 4.70 | 0.047 | 0.021 | 0.103 |
| 02020 | 16 | 10 | 2.39% | 2.56 | 6.93 | 2.52 | 0.025 | 0.018 | 0.035 |
| 02021 | 2 | 2 | 0.47% | 4.49 | 4.33 | 4.34 | 0.044 | 0.027 | 0.070 |
| 02022 | 2 | 0 | 0.02% | 7.88 | | 7.37 | 0.074 | 0.033 | 0.158 |
| 02100 | 21 | 18 | 4.24% | 2.65 | 5.06 | 2.60 | 0.026 | 0.020 | 0.035 |
| 02101 | 5 | 3 | 0.72% | 4.64 | 7.22 | 4.48 | 0.045 | 0.029 | 0.070 |
| 02102 | 0 | 0 | 0.00% | 8.14 | | 7.60 | 0.076 | 0.035 | 0.160 |
| 02120 | 11 | 8 | 1.90% | 4.28 | 5.96 | 4.14 | 0.042 | 0.030 | 0.058 |
| 02121 | 1 | 0 | 0.01% | 7.50 | | 7.04 | 0.071 | 0.044 | 0.112 |
| 02122 | 0 | 0 | 0.00% | 13.15 | | 11.72 | 0.118 | 0.054 | 0.239 |
| 02200 | 4 | 4 | 0.94% | 4.42 | 4.33 | 4.27 | 0.043 | 0.028 | 0.065 |
| 02201 | 3 | 1 | 0.25% | 7.75 | 13.00 | 7.26 | 0.073 | 0.043 | 0.121 |
| 02202 | 0 | 0 | 0.00% | 13.59 | | 12.06 | 0.121 | 0.053 | 0.252 |
| 02220 | 2 | 1 | 0.24% | 7.13 | 8.67 | 6.72 | 0.068 | 0.043 | 0.106 |
| 02221 | 0 | 0 | 0.00% | 12.51 | | 11.21 | 0.113 | 0.065 | 0.189 |
| 02222 | 0 | 0 | 0.00% | 21.94 | | 18.13 | 0.182 | 0.082 | 0.358 |
| 20000 | 9 | 6 | 1.43% | 1.58 | 6.50 | 1.57 | 0.016 | 0.011 | 0.023 |
| 20001 | 0 | 0 | 0.00% | 2.76 | | 2.72 | 0.027 | 0.016 | 0.045 |
| 20002 | 0 | 0 | 0.00% | 4.85 | | 4.67 | 0.047 | 0.020 | 0.105 |
| 20020 | 8 | 4 | 0.97% | 2.54 | 8.67 | 2.51 | 0.025 | 0.017 | 0.037 |
| 20021 | 0 | 0 | 0.00% | 4.46 | | 4.31 | 0.043 | 0.026 | 0.072 |
| 20022 | 0 | 0 | 0.00% | 7.83 | | 7.33 | 0.074 | 0.032 | 0.161 |
| 20100 | 5 | 6 | 1.40% | 2.63 | 3.61 | 2.59 | 0.026 | 0.018 | 0.037 |
| 20101 | 4 | 1 | 0.26% | 4.61 | 17.33 | 4.45 | 0.045 | 0.027 | 0.072 |
| 20102 | 0 | 0 | 0.00% | 8.09 | | 7.55 | 0.076 | 0.033 | 0.163 |
| 20120 | 4 | 1 | 0.26% | 4.25 | 17.33 | 4.11 | 0.041 | 0.028 | 0.060 |
| 20121 | 1 | 0 | 0.01% | 7.45 | | 6.99 | 0.070 | 0.042 | 0.115 |
| 20122 | 0 | 0 | 0.00% | 13.06 | | 11.65 | 0.117 | 0.052 | 0.242 |
| 20200 | 0 | 1 | 0.23% | 4.39 | 0.00 | 4.24 | 0.043 | 0.027 | 0.066 |
| 20201 | 1 | 0 | 0.01% | 7.70 | | 7.21 | 0.072 | 0.041 | 0.124 |
| 20202 | 0 | 0 | 0.00% | 13.50 | | 11.99 | 0.121 | 0.052 | 0.255 |
| 20220 | 0 | 0 | 0.00% | 7.09 | | 6.68 | 0.067 | 0.041 | 0.108 |
| 20221 | 0 | 0 | 0.00% | 12.43 | | 11.15 | 0.112 | 0.063 | 0.192 |
| 20222 | 0 | 0 | 0.00% | 21.80 | | 18.03 | 0.181 | 0.080 | 0.361 |
| 21000 | 22 | 25 | 5.83% | 1.99 | 3.81 | 1.97 | 0.020 | 0.015 | 0.026 |
| 21001 | 3 | 4 | 0.93% | 3.48 | 3.25 | 3.40 | 0.034 | 0.022 | 0.053 |
| 21002 | 1 | 0 | 0.01% | 6.11 | | 5.81 | 0.058 | 0.026 | 0.125 |
| 21020 | 11 | 14 | 3.26% | 3.21 | 3.40 | 3.14 | 0.032 | 0.023 | 0.043 |
| 21021 | 1 | 2 | 0.46% | 5.62 | 2.17 | 5.37 | 0.054 | 0.034 | 0.085 |
| 21022 | 0 | 0 | 0.00% | 9.86 | | 9.05 | 0.091 | 0.041 | 0.190 |
| 21100 | 26 | 24 | 5.64% | 3.31 | 4.69 | 3.24 | 0.033 | 0.025 | 0.042 |
| 21101 | 1 | 2 | 0.46% | 5.81 | 2.17 | 5.54 | 0.056 | 0.036 | 0.085 |
| 21102 | 1 | 0 | 0.01% | 10.19 | | 9.33 | 0.094 | 0.043 | 0.191 |
| 21120 | 16 | 6 | 1.48% | 5.35 | 11.56 | 5.12 | 0.051 | 0.037 | 0.071 |
| 21121 | 4 | 0 | 0.03% | 9.38 | | 8.65 | 0.087 | 0.055 | 0.135 |
| 21122 | 0 | 0 | 0.00% | 16.45 | | 14.24 | 0.143 | 0.067 | 0.281 |
| 21200 | 3 | 1 | 0.25% | 5.53 | 13.00 | 5.29 | 0.053 | 0.036 | 0.078 |
| 21201 | 3 | 0 | 0.02% | 9.69 | | 8.92 | 0.090 | 0.054 | 0.146 |
| 21202 | 0 | 0 | 0.00% | 17.00 | | 14.65 | 0.147 | 0.067 | 0.295 |
| 21220 | 2 | 2 | 0.47% | 8.93 | 4.33 | 8.27 | 0.083 | 0.053 | 0.127 |
| 21221 | 1 | 0 | 0.01% | 15.65 | | 13.65 | 0.137 | 0.081 | 0.223 |
| 21222 | 0 | 0 | 0.00% | 27.46 | | 21.69 | 0.218 | 0.101 | 0.409 |
| 22000 | 13 | 23 | 5.31% | 2.50 | 2.45 | 2.46 | 0.025 | 0.018 | 0.034 |
| 22001 | 4 | 1 | 0.26% | 4.39 | 17.33 | 4.24 | 0.043 | 0.027 | 0.068 |
| 22002 | 0 | 1 | 0.23% | 7.69 | 0.00 | 7.21 | 0.072 | 0.032 | 0.154 |
| 22020 | 3 | 10 | 2.29% | 4.04 | 1.30 | 3.92 | 0.039 | 0.027 | 0.056 |
| 22021 | 1 | 0 | 0.01% | 7.08 | | 6.67 | 0.067 | 0.041 | 0.107 |
| 22022 | 0 | 0 | 0.00% | 12.42 | | 11.14 | 0.112 | 0.051 | 0.230 |
| 22100 | 15 | 5 | 1.25% | 4.17 | 13.00 | 4.04 | 0.041 | 0.030 | 0.055 |
| 22101 | 1 | 0 | 0.01% | 7.32 | | 6.88 | 0.069 | 0.044 | 0.107 |
| 22102 | 0 | 0 | 0.00% | 12.83 | | 11.47 | 0.115 | 0.053 | 0.232 |
| 22120 | 3 | 5 | 1.16% | 6.74 | 2.60 | 6.37 | 0.064 | 0.045 | 0.091 |
| 22121 | 3 | 1 | 0.25% | 11.82 | 13.00 | 10.66 | 0.107 | 0.066 | 0.168 |
| 22122 | 0 | 0 | 0.00% | 20.72 | | 17.30 | 0.174 | 0.081 | 0.333 |
| 22200 | 4 | 0 | 0.03% | 6.96 | | 6.57 | 0.066 | 0.043 | 0.100 |
| 22201 | 0 | 0 | 0.00% | 12.21 | | 10.97 | 0.110 | 0.065 | 0.181 |
| 22202 | 0 | 0 | 0.00% | 21.42 | | 17.77 | 0.179 | 0.081 | 0.348 |
| 22220 | 4 | 1 | 0.26% | 11.24 | 17.33 | 10.19 | 0.102 | 0.064 | 0.160 |
| 22221 | 0 | 0 | 0.00% | 19.72 | | 16.60 | 0.167 | 0.097 | 0.271 |
| 22222 | 0 | 0 | 0.00% | 34.58 | | 25.86 | 0.260 | 0.122 | 0.470 |

[0340] To simplify the interpretation of genotype risk, the 243 unique genotypes were divided into five risk classes on the basis of each estimated penetrance. The levels selected for risk class definitions and the resulting assignment of genotypes into five risk classes is shown in Table 34. The frequency percent of each genotype combination is given in parentheses.

TABLE 34

| Class 1 | | Class 2 | Class 3 | Class 4 | Class 5 |
|---|---|---|---|---|---|
| (0, 0.013] | | (0.013, 0.025] | (0.025, 0.042] | (0.042, 0.1] | (0.1, 1) |
| 00000 | (5.94) | 00001 (0.68) | 00022 (0.00) | 00102 (0.00) | 00222 (0.00) |
| 00020 | (2.06) | 00002 (0.00) | 00121 (0.00) | 00122 (0.00) | 01222 (0.00) |
| 01000 | (10.84) | 00021 (0.68) | 00220 (0.23) | 00201 (0.00) | 02022 (0.02) |
| 22000 | (5.31) | 00100 (4.60) | 01002 (0.00) | 00202 (0.00) | 02122 (0.00) |
| | | 00101 (0.24) | 01021 (0.94) | 00221 (0.01) | 02202 (0.00) |
| | | 00120 (1.41) | 01101 (0.92) | 01022 (0.00) | 02221 (0.00) |
| | | 00200 (0.91) | 01120 (1.47) | 01102 (0.00) | 02222 (0.00) |
| | | 01001 (0.25) | 01200 (0.94) | 01121 (0.00) | 20002 (0.00) |
| | | 01020 (5.12) | 02001 (0.24) | 01122 (0.00) | 20022 (0.00) |
| | | 01100 (7.64) | 02020 (2.39) | 01201 (0.23) | 20122 (0.00) |
| | | 02000 (9.01) | 02100 (4.24) | 01202 (0.00) | 20222 (0.00) |
| | | 21000 (5.83) | 02200 (0.94) | 01220 (0.01) | 21102 (0.01) |
| | | 22001 (0.26) | 20000 (1.43) | 01221 (0.00) | 21122 (0.00) |
| | | 22020 (2.29) | 20100 (1.40) | 02002 (0.01) | 21201 (0.02) |
| | | | 20200 (0.23) | 02021 (0.47) | 21202 (0.00) |
| | | | 20220 (0.00) | 02101 (0.72) | 21221 (0.01) |
| | | | 21001 (0.93) | 02102 (0.00) | 21222 (0.00) |
| | | | 21020 (3.26) | 02120 (1.90) | 22102 (0.00) |
| | | | 21100 (5.64) | 02121 (0.01) | 22121 (0.25) |
| | | | 22002 (0.23) | 02201 (0.25) | 22122 (0.00) |
| | | | 22021 (0.01) | 02220 (0.24) | 22200 (0.03) |
| | | | 22100 (1.25) | 20001 (0.00) | 22201 (0.00) |
| | | | | 20020 (0.97) | 22202 (0.00) |
| | | | | 20021 (0.00) | 22220 (0.26) |
| | | | | 20101 (0.26) | 22221 (0.00) |
| | | | | 20102 (0.00) | 22222 (0.00) |
| | | | | 20120 (0.26) | |
| | | | | 20121 (0.01) | |
| | | | | 20201 (0.01) | |
| | | | | 20202 (0.00) | |
| | | | | 20221 (0.00) | |
| | | | | 21002 (0.01) | |
| | | | | 21021 (0.46) | |
| | | | | 21022 (0.00) | |
| | | | | 21101 (0.46) | |
| | | | | 21120 (1.48) | |
| | | | | 21121 (0.03) | |
| | | | | 21200 (0.25) | |
| | | | | 21220 (0.47) | |
| | | | | 22022 (0.00) | |
| | | | | 22101 (0.01) | |
| | | | | 22120 (1.16) | |

[0341] With this classification, each genotype was recoded as belonging to their respective class and a logistic regression model was fit with the genotype risk class as a categorical variable. Key summary statistics are summarized in Table 35. Each group is described by the number of cases, number of controls, the estimated risk class population frequency, the odds ratio comparing the odds of the given risk class compared to the odds of the lowest risk class, the penetrance, the relative risk (risk class penetrance divided by most protective risk class penetrance), and the population relative risk (risk class penetrance divided by the disease prevalence: 0.03).

TABLE 35

| Risk Class | N Case | N Control | Frequency (%) | OR | Penetrance | RR | RR (Pop) |
|---|---|---|---|---|---|---|---|
| G1 | 46 | 105 | 24.2 | 1.0 | 0.012 | 1.0 | 0.41 |
| G2 | 112 | 168 | 38.9 | 1.5 | 0.019 | 1.5 | 0.62 |
| G3 | 140 | 113 | 26.7 | 2.8 | 0.034 | 2.8 | 1.13 |
| G4 | 77 | 40 | 9.7 | 4.4 | 0.052 | 4.2 | 1.73 |
| G5 | 18 | 2 | 0.06 | 20.5 | 0.204 | 16.6 | 6.79 |

### Example 10

### Inhibition of ICAM Gene Expression by Transfection of Specific siRNAs

[0342] RNAi-based gene inhibition was selected as a rapid way to inhibit expression of ICAM1 in cultured cells. siRNA reagents were selectively designed to target the ICAM 1 gene. Algorithms useful for designing siRNA molecules specific for an ICAM 1 gene are disclosed at the http address www.dharmacon.com. siRNA molecules up to 21 nucleotides in length were utilized.

[0343] Table 31 summarizes the features of the duplexes that were used in the assays to target ICAM1. A non-homologous siRNA reagent (siGL2 control) was used as a negative control, and a non-homologous siRNA reagent (siRNA_RAD21_{—}1175 control) shown to inhibit the expression of RAD21 and subsequently inhibit cell proliferation was used as a positive control in all of the assays described herein.

TABLE 36

| siRNA | siRNA Target | Sequence Specificity | SEQ ID NO: |
|---|---|---|---|
| ICAM1_293 | ICAM1 | ACAACCGGAAGGUGUAUGA | |
| ICAM1_335 | ICAM1 | GCCAACCAAUGUGCUAUUC | |
| ICAM1_604 | ICAM1 | GAUCACCAUGGAGCCAAUU | |
| ICAM1_1409 | ICAM1 | CUGUCACUCGAGAUCUUGA | |
| siRNA_RAD21_1175 | RAD21 | GAGUUGGAUAGCAAGACAA | |
| positive control | | | |
| siGL2 negative | GL2 | CGUACGCGGAAUACUUCGA | |
| control | | | |

[0344] The siRNAs were transfected in cell lines MCF-7 and T-47D using Lipofectamine™ 2000 reagent from Invitrogen, Corp. 2.5 μg or 5.0 μg of siRNA was mixed with 6.25 μl or 12.5 μl lipofectamine, respectively, and the mixture was added to cells grown in 6-well plates. Their inhibitory effects on ICAM 1 gene expression were confirmed by precision expression analysis by MassARRAY (quantitativeRT-PCR hME), which was performed on RNA prepared from the transfected cells. See Chunming & Cantor, PNAS 100(6): 3059-3064 (2003). Cell viability was measured at 1, 2, 4 and 6 days post-transfection. Absorbance values were normalized relative to Day 1. RNA was extracted with Trizole reagent as recommended by the manufacturer (Invitrogen, Corp.) followed by cDNA synthesis using SuperScript™ reverse transcriptase.

[0345] A cocktail of siRNA molecules described in Table 28 (that target ICAM1) strongly inhibited proliferation of breast cancer cell line (MCF-7), as shown in FIG. 3. These effects are consistent in all six experiments performed. Each data point is an average of 3 wells of a 96-well plate normalized to values obtained from day 1 post transfection. The specificity of the active siRNAs, was confirmed with a negative, non-homologous control siRNA (siGL2), and a positive control, siRNA_RAD21_{—}1175, that targets a known cancer-associated gene, RAD21. Long term inhibition of gene expression is desirable in certain cases. Therefore, included herein are embodiments directed to siRNA duplexes described herein (see Table 36) that are less susceptible to degradation. An example of a modification that decreases susceptibility to degradation is in siSTABLE RNA described at http address www.dharmacon.com.

### Example 11

### In Vitro Production of Target Polypeptides

[0346] cDNA is cloned into a pIVEX 2.3-MCS vector (Roche Biochem) using a directional cloning method. A cDNA insert is prepared using PCR with forward and reverse primers having 5′ restriction site tags (in frame) and 5-6 additional nucleotides in addition to 3′ gene-specific portions, the latter of which is typically about twenty to about twenty-five base pairs in length. A Sal I restriction site is introduced by the forward primer and a Sma I restriction site is introduced by the reverse primer. The ends of PCR products are cut with the corresponding restriction enzymes (i.e., Sal I and Sma I) and the products are gel-purified. The pIVEX 2.3-MCS vector is linearized using the same restriction enzymes, and the fragment with the correct sized fragment is isolated by gel-purification. Purified PCR product is ligated into the linearized pIVEX 2.3-MCS vector and E. coli cells transformed for plasmid amplification. The newly constructed expression vector is verified by restriction mapping and used for protein production.

[0347] E. coli lysate is reconstituted with 0.25 ml of Reconstitution Buffer, the Reaction Mix is reconstituted with 0.8 ml of Reconstitution Buffer; the Feeding Mix is reconstituted with 10.5 ml of Reconstitution Buffer; and the Energy Mix is reconstituted with 0.6 ml of Reconstitution Buffer. 0.5 ml of the Energy Mix was added to the Feeding Mix to obtain the Feeding Solution. 0.75 ml of Reaction Mix, 50 μl of Energy Mix, and 10 μg of the template DNA is added to the E. coli lysate.

[0348] Using the reaction device (Roche Biochem), 1 ml of the Reaction Solution is loaded into the reaction compartment. The reaction device is turned upside-down and 10 ml of the Feeding Solution is loaded into the feeding compartment. All lids are closed and the reaction device is loaded into the RTS500 instrument. The instrument is run at 30° C. for 24 hours with a stir bar speed of 150 rpm. The pIVEX 2.3 MCS vector includes a nucleotide sequence that encodes six consecutive histidine amino acids on the C-terminal end of the target polypeptide for the purpose of protein purification. Target polypeptide is purified by contacting the contents of reaction device with resin modified with Ni²⁺ ions. Target polypeptide is eluted from the resin with a solution containing free Ni²⁺ ions.

### Example 12

### Cellular Production of Target Polypeptides

[0349] Nucleic acids are cloned into DNA plasmids having phage recombination cites and target polypeptides are expressed therefrom in a variety of host cells. Alpha phage genomic DNA contains short sequences known as attP sites, and E. coli genomic DNA contains unique, short sequences known as attB sites. These regions share homology, allowing for integration of phage DNA into E. coli via directional, site-specific recombination using the phage protein Int and the E. coli protein IHF. Integration produces two new att sites, L and R, which flank the inserted prophage DNA. Phage excision from E. coli genomic DNA can also be accomplished using these two proteins with the addition of a second phage protein, X is. DNA vectors have been produced where the integration/excision process is modified to allow for the directional integration or excision of a target DNA fragment into a backbone vector in a rapid in vitro reaction (Gateway™ Technology (Invitrogen, Inc.)).

[0350] A first step is to transfer the nucleic acid insert into a shuttle vector that contains attL sites surrounding the negative selection gene, ccdB (e.g. pENTER vector, Invitrogen, Inc.). This transfer process is accomplished by digesting the nucleic acid from a DNA vector used for sequencing, and to ligate it into the multicloning site of the shuttle vector, which will place it between the two attL sites while removing the negative selection gene ccdB. A second method is to amplify the nucleic acid by the polymerase chain reaction (PCR) with primers containing attB sites. The amplified fragment then is integrated into the shuttle vector using Int and IHF. A third method is to utilize a topoisomerase-mediated process, in which the nucleic acid is amplified via PCR using gene-specific primers with the 5′ upstream primer containing an additional CACC sequence (e.g., TOPO® expression kit (Invitrogen, Inc.)). In conjunction with Topoisomerase I, the PCR amplified fragment can be cloned into the shuttle vector via the attL sites in the correct orientation.

[0351] Once the nucleic acid is transferred into the shuttle vector, it can be cloned into an expression vector having attR sites. Several vectors containing attR sites for expression of target polypeptide as a native polypeptide, N-fusion polypeptide, and C-fusion polypeptides are commercially available (e.g., pDEST (Invitrogen, Inc.)), and any vector can be converted into an expression vector for receiving a nucleic acid from the shuttle vector by introducing an insert having an attR site flanked by an antibiotic resistant gene for selection using the standard methods described above. Transfer of the nucleic acid from the shuttle vector is accomplished by directional recombination using Int, IHF, and X is (LR clonase). Then the desired sequence can be transferred to an expression vector by carrying out a one hour incubation at room temperature with Int, IHF, and X is, a ten minute incubation at 37° C. with proteinase K, transforming bacteria and allowing expression for one hour, and then plating on selective media. Generally, 90% cloning efficiency is achieved by this method. Examples of expression vectors are pDEST 14 bacterial expression vector with att7 promoter, pDEST 15 bacterial expression vector with a T7 promoter and a N-terminal GST tag, pDEST 17 bacterial vector with a T7 promoter and a N-terminal polyhistidine affinity tag, and pDEST 12.2 mammalian expression vector with a CMV promoter and neo resistance gene. These expression vectors or others like them are transformed or transfected into cells for expression of the target polypeptide or polypeptide variants. These expression vectors are often transfected, for example, into murine-transformed a adipocyte cell line 3T3-L1, (ATCC), human embryonic kidney cell line 293, and rat cardiomyocyte cell line H9C2.

### Example 13

### Haplotype analysis of the KIAA0861 locus

[0352] rs6804951 and rs2001449 are significant at the allele and genotype levels (P<0.05). Moderate LD is observed for markers rs3732602 and rs2293203 (r\hat{ }2=0.646). Chi-squared tests indicate that haplotypes are significantly associated with breast cancer. Cell-specific chi-square values indicate that TTTTG and CTTTC haplotypes are contributors to this relationship. Odds ratios and score tests indicate that individuals carrying the TTTG are less likely to have breast cancer, while individuals with CTTTC are at elevated risk for the disease. Moreover, the odds ratio estimated for the CGTTC indicates more than a two-fold risk of disease among its carriers, although this result must be interpreted with great caution due to the low observed frequency in the population.

[0353] Summary Statistics of Alleles and Genotypes

### SNP Locations

[0354]

| SNP. ID | Type | Location |
|---|---|---|
| rs6804951 | Proximal | 184327431 |
| rs7639705 | Proximal | 184330963 |
| rs3732602 | Proximal | 184408945 |
| rs2293203 | Proximal | 184419992 |
| rs2001449 | Incident | 184429569 |

### Allele by GYNGroup

[0355]

| | | Case | | Control | | Test |
|---|---|---|---|---|---|---|
| | N | (N = 544) | | (N = 552) | | Statistic |
| rs6804951:T | 1064 | 5% | (24) | 9% | (46) | Chi-square = 6.71 |
| | | | | | | d.f. = 1 P = 0.00958 |
| rs7639705:T | 1086 | 80% | (434) | 81% | (441) | Chi-square = 0.03 |
| | | | | | | d.f. = 1 P = 0.868 |
| rs3732602:T | 1074 | 99% | (532) | 99% | (532) | Chi-square = 0.4 |
| | | | | | | d.f. = 1 P = 0.529 |
| rs2293203:T | 1088 | 99% | (536) | 99% | (538) | Chi-square = 0.27 |
| | | | | | | d.f. = 1 P = 0.6 |
| \|rs200144:C | 1084 | 30% | (161) | 22% | (119) | Chi-square = 8.49 |
| | | | | | | d.f. P = 0.00356 |

### Genotype by GYNGroup

[0356]

| | | Case | | Control | | Test |
|---|---|---|---|---|---|---|
| | N | (N = 272) | | (N = 276) | | Statistic |
| rs6804951:CC | 532 | 91% | (238) | 83% | (225) | Chi-square = 7.13 |
| | | | | | | d.f. = 2 P = 0.0283 |
| CT | | 9% | (24) | 16% | (44) | |
| TT | | 0% | (0) | 0% | (1) | |
| rs7639705:GG | 543 | 3% | (9) | 5% | (14) | Chi-square = 2.03 |
| | | | | | | d.f. = 2 P = 0.362 |
| GT | | 33% | (88) | 28% | (77) | |
| TT | | 64% | (173) | 67% | (182) | |
| rs3732602:TT | 537 | 99% | (264) | 98% | (263) | Chi-square = 0.4 |
| | | | | | | d.f. = 1 P = 0.527 |
| rs2293203:TT | 544 | 98% | (265) | 97% | (265) | Chi-square = 0.28 |
| | | | | | | d.f. = 1 P = 0.598 |
| rs2001449:GG | 542 | 47% | (128) | 60% | (162) | Chi-square = 9.29 |
| | | | | | | d.f. = 2 P = 0.00961 |
| GC | | 46% | (125) | 37% | (99) | |
| CC | | 7% | (18) | 4% | (10) | |

[0357] Genotype OC: Test of Hardy-Weinberg Equilibrium Cases

| | A. freq | D | ChiSq | Pvalue |
|---|---|---|---|---|
| rs6804951 | 0.936 | −0.002280 | 0.7870 | 0.3750 |
| rs7639705 | 0.807 | 0.004790 | 0.5150 | 0.4730 |
| rs3732602 | 0.990 | −0.000101 | 0.0565 | 0.8120 |
| rs2293203 | 0.987 | −0.000164 | 0.0921 | 0.7620 |
| rs2001449 | 0.744 | −0.014500 | 3.1400 | 0.0763 |

### Controls

[0358]

| | A. freq | D | ChiSq | Pvalue |
|---|---|---|---|---|
| rs6804951 | 0.916 | −0.003400 | 0.5350 | 0.465 |
| rs7639705 | 0.808 | −0.014400 | 2.3600 | 0.124 |
| rs3732602 | 0.989 | 0.000120 | 0.0336 | 0.855 |
| rs2293203 | 0.985 | −0.000213 | 0.0601 | 0.806 |
| rs2001449 | 0.783 | −0.010700 | 1.0800 | 0.299 |

[0359] Summary Statistics: Linkage Disequilibrium

### PHASE Haplotype Frequencies

[0360]

| | H. freq | H. relfreq |
|---|---|---|
| CGTTC | 13 | 0.012 |
| CGTTG | 191 | 0.175 |
| CTCAG | 10 | 0.009 |
| CTCTG | 1 | 0.001 |
| CTTAG | 4 | 0.004 |
| CTTTC | 265 | 0.243 |
| CTTTG | 538 | 0.493 |
| TGTTG | 7 | 0.006 |
| TTTTC | 2 | 0.002 |
| TTTTG | 61 | 0.056 |

[0361] Linkage Disequilibrium Between Markers

### r\hat{ }2

[0362]

| | rs6804951 | rs7639705 | rs3732602 | rs2293203 | rs2001449 |
|---|---|---|---|---|---|
| rs6804951 | 1.000000 | 0.00382 | 0.000697 | 0.00089 | 0.01860 |
| rs7639705 | 0.003820 | 1.00000 | 0.002440 | 0.00311 | 0.04770 |
| rs3732602 | 0.000697 | 0.00244 | 1.000000 | 0.64600 | 0.00351 |
| rs2293203 | 0.000890 | 0.00311 | 0.646000 | 1.00000 | 0.00448 |
| rs2001449 | 0.018600 | 0.04770 | 0.003510 | 0.00448 | 1.00000 |

### D′

[0363]

| | rs6804951 | rs7639705 | rs3732602 | rs2293203 | rs2001449 |
|---|---|---|---|---|---|
| rs6804951 | 1.0000 | 0.116 | 0.0685 | 0.0685 | 0.306 |
| rs7639705 | 0.1160 | 1.000 | 0.2400 | 0.2400 | 0.262 |
| rs3732602 | 0.0685 | 0.240 | 1.0000 | 0.9080 | 0.345 |
| rs2293203 | 0.0685 | 0.240 | 0.9080 | 1.0000 | 0.345 |
| rs2001449 | 0.3060 | 0.262 | 0.3450 | 0.3450 | 1.000 |

### P-value

[0364]

| | rs6804951 | rs7639705 | rs3732602 | rs2293203 | rs2001449 |
|---|---|---|---|---|---|
| rs6804951 | 1.00e+00 | 4.12e−02 | 0.3830 | 0.3240 | 6.40e−06 |
| rs7639705 | 4.12e−02 | 1.00e+00 | 0.1030 | 0.0653 | 5.41e−13 |
| rs3732602 | 3.83e−01 | 1.03e−01 | 1.0000 | 0.0000 | 5.03e−02 |
| rs2293203 | 3.24e−01 | 6.53e−02 | 0.0000 | 1.0000 | 2.70e−02 |
| rs2001449 | 6.40e−06 | 5.41e−13 | 0.0503 | 0.0270 | 1.00e+00 |

[0365] Haplotype by GYNGroup

### PHASE Haplotypes (All)

[0366]

| | Case | Case(%) | Case.X\hat{ }2 | Control | Control(%) | Control.X\hat{ }2 | OR | In. OR |
|---|---|---|---|---|---|---|---|---|
| TTTTG | 20 | 1.83 | 3.55 | 41 | 3.75 | 3.53 | 0.4782 | −0.7377 |
| CTCAG | 4 | 0.37 | 0.19 | 6 | 0.55 | 0.19 | 0.6654 | −0.4074 |
| TGTTG | 3 | 0.27 | 0.07 | 4 | 0.37 | 0.07 | 0.7493 | −0.2886 |
| CTTTG | 259 | 23.72 | 0.30 | 279 | 25.55 | 0.30 | 0.9060 | −0.987 |
| CGTTG | 94 | 8.61 | 0.01 | 97 | 8.88 | 0.01 | 0.9662 | −0.0344 |
| CTTAG | 2 | 0.18 | 0.00 | 2 | 0.18 | 0.00 | 1.0000 | 0.0000 |
| TTTTC | 1 | 0.09 | 0.00 | 1 | 0.09 | 0.00 | 1.0000 | 0.0000 |
| CTTTC | 151 | 13.83 | 2.73 | 114 | 10.44 | 2.71 | 1.3766 | 0.3196 |
| CGTTC | 9 | 0.82 | 0.98 | 4 | 0.37 | 0.98 | 2.2604 | 0.8155 |
| CTCTG | 1 | 0.09 | 0.51 | 0 | 0.00 | 0.50 | Inf | Inf |

Pearson Chi-squared Test = 16.6377, DF = 9, P-value = 0.0547

### PHASE Haplotypes (Low Frequency Removed)

[0367]

| | Case | Case(%) | Case.X\hat{ }2 | Control | Control(%) | Control.X\hat{ }2 | OR | In.OR |
|---|---|---|---|---|---|---|---|---|
| TTTTG | 20 | 1.86 | 3.55 | 41 | 3.80 | 3.52 | 0.4781 | −0.7379 |
| CTCAG | 4 | 0.37 | 0.19 | 6 | 0.56 | 0.19 | 0.6654 | −0.4074 |
| CTTTG | 259 | 24.03 | 0.30 | 279 | 25.88 | 0.30 | 0.9056 | −0.0992 |
| CGTTG | 94 | 8.72 | 0.01 | 97 | 9.00 | 0.01 | 0.9661 | −0.0345 |
| CTTTC | 151 | 14.01 | 2.73 | 114 | 10.58 | 2.71 | 1.3774 | 0.3202 |
| CGTTC | 9 | 0.83 | 0.98 | 4 | 0.37 | 0.98 | 2.2605 | 0.8156 |

Pearson Chi-squared Test = 15.4946, DF = 5, P-value = 0.008445

[0368] haplo.score Haplotypes

| | Hap. Freq | Score P. | X\hat{ }2 | P. Sim |
|---|---|---|---|---|
| TTTTG | 0.0529 | −2.1206 | 0.0340 | 0.0342 |
| TGTTG | 0.0101 | −2.0668 | 0.0388 | 0.0236 |
| CTCAG | 0.0073 | −1.2914 | 0.1966 | 0.2902 |
| CTTTG | 0.5221 | −1.2275 | 0.2196 | 0.2195 |
| CGTTG | 0.1448 | −0.1441 | 0.8854 | 0.8834 |
| CTTTC | 0.2267 | 2.3422 | 0.0192 | 0.0192 |
| CGTTC | 0.0307 | 2.6994 | 0.0069 | 0.0050 |

Global Score = 20.343, DF = 7, Global P. X\hat{ }2 = 0.0049, Global P. Sim = 0.0022

### Example 14

### Haplotype analysis of the NUMA1 locus

[0369] All markers noted below except 2276396 are associated with breast cancer at the allele level (P<0.05). Marker 675185 does not maintain this relationship at the genotype level. Strong LD is observed across the entire region but is particular strong between and among 1894003, 675185, 673478, and 615000. Pearson chi-squared statistics suggest that haplotypes are significantly associated with breast cancer. Haplotype TTCTC contributes the most to this relationship. Odds ratios and score statistics indicate that individuals with haplotype TTCTC are 2.6 times more likely to have breast cancer than individuals with other haplotypes.

[0370] Statistics

[0371] Chi-squared statistics are estimated to assess whether 1) alleles and genotypes are associated with breast cancer status and 2) marker genotype frequencies deviate significantly from Hardy-Weinberg equilibrium (HWE). Haplotype frequencies and relative frequencies are estimated, as well as several statistics (r², D′, and p-value) that gauge the extent and stability of linkage disequilibrium between markers in each region. Chi-squared statistics and score tests are estimated to determine whether reconstructed haplotypes are significantly associated with breast cancer status (P<0.05). P-values are estimated for 1) the full set of reconstructed haplotypes and 2) a reduced set that excludes haplotypes with observed frequencies less than 10. Results are presented by chromosome order.

Results

[0372] Summary Statistics: Alleles and Genotypes

### SNP Locations

[0373]

| SNP. ID | Type | Location |
|---|---|---|
| 1894003 | Proximal | 71972974 |
| 675185 | Proximal | 71998270 |
| 673478 | Incident | 72021802 |
| 615000 | Proximal | 72025650 |
| 2276396 | Proximal | 72046603 |

### Allele by GYNGroup

[0374]

| | | Case | Control | Test |
|---|---|---|---|---|
| | N | (N = 510) | (N-538) | Statistic |
| 1894003:C | 1026 | 91%(450) | 96%(510) | Chi-square = 6.95 |
| | | | | d.f. = 1 P = 0.00838 |
| 675185:G | 1010 | 92%(451) | 95%(498) | Chi-square = 3.96 |
| | | | | d.f. = 1 P = 0.0466 |
| 673478:C | 1022 | 8%(41) | 5%(25) | Chi-square = 5.68 |
| | | | | d.f. = 1 P = 0.0171 |
| 615000:G | 1010 | 92%(434) | 96%(513) | Chi-square = 7.4 |
| | | | | d.f. = 1 P = 0.00652 |
| 2276396:C | 1028 | 97%(478) | 98%(523) | Chi-square = 0.18 |
| | | | | d.f. = 1 P = 0.674 |

### Genotype by GYNGroup

[0375]

| | | Case | Control | Test |
|---|---|---|---|---|
| | N | (N = 255) | (N = 269) | Statistic |
| 1894003:TT | 513 | 1%(3) | 0%(0) | Chi-square = 7.43 |
| | | | | d.f. = 2 P = 0.0243 |
| TC | | 15%(36) | 9%(24) | |
| CC | | 84%(207) | 91%(243) | |
| 675185:TT | 505 | 0%(1) | 0%(0) | Chi-square = 4.37 |
| | | | | d.f. = 2 P = 0.112 |
| TG | | 14%(35) | 9%(24) | |
| GG | | 85%(208) | 91%(237) | |
| 673478:TT | 511 | 84%(207) | 91%(241) | Chi-square = 6.39 |
| | | | | d.f. = 2 P = 0.0409 |
| TC | | 14%(35) | 9%(25) | |
| CC | | 1%(3) | 0%(0) | |
| 615000:TT | 505 | 1%(3) | 0%(0) | Chi-square = 7.8 |
| | | | | d.f. = 2 P = 0.0202 |
| TG | | 14%(34) | 9%(23) | |
| GG | | 84%(200) | 91%(245) | |
| 2276396:CC | 514 | 4%(232) | 95%(255) | Chi-square = 0.18 |
| | | | | d.f. = 1 P = 0.67 |

Hardy-Weinberg Proportions

### All

[0376]

| | A. freq | D | ChiSq | Pvalue |
|---|---|---|---|---|
| 1894003 | 0.935 | 0.00159 | 0.350 | 0.554 |
| 675185 | 0.935 | 0.00159 | 0.350 | 0.554 |
| 673478 | 0.935 | 0.00159 | 0.350 | 0.554 |
| 615000 | 0.937 | 0.00184 | 0.495 | 0.482 |
| 2276396 | 0.974 | −0.00069 | 0.374 | 0.541 |

### Control

[0377]

| | A. freq | D | ChiSq | Pvalue |
|---|---|---|---|---|
| 1894003 | 0.953 | −0.002190 | 0.644 | 0.422 |
| 675185 | 0.953 | −0.002190 | 0.644 | 0.422 |
| 673478 | 0.953 | −0.002190 | 0.644 | 0.422 |
| 615000 | 0.957 | −0.001860 | 0.541 | 0.462 |
| 2276396 | 0.976 | −0.000593 | 0.166 | 0.683 |

Summary Statistics: Linkage Disequilibrium

### Haplotype Frequencies

[0378]

| | H. freq | H. relfreq |
|---|---|---|
| CGTGC | 961 | 0.935 |
| TTCGC | 1 | 0.001 |
| TTCGG | 1 | 0.001 |
| TTCTC | 39 | 0.038 |
| TTCTG | 26 | 0.025 |

Linkage Disequilibrium Between Markers

### r²

[0379]

| | 1894003 | 675185 | GP11.079035103 | 615000 | 2276396 |
|---|---|---|---|---|---|
| 1894003 | 1.000 | 1.000 | 1.000 | 0.968 | 0.387 |
| 675185 | 1.000 | 1.000 | 1.000 | 0.968 | 0.387 |
| 673478 | 1.000 | 1.000 | 1.000 | 0.968 | 0.387 |
| 615000 | 0.968 | 0.968 | 0.968 | 1.000 | 0.369 |
| 2276396 | 0.387 | 0.387 | 0.387 | 0.369 | 1.000 |

### D′

[0380]

| | 1894003 | 675185 | GP11.079035103 | 615000 | 2276396 |
|---|---|---|---|---|---|
| 1894003 | 1 | 1 | 1 | 1.00 | 1.00 |
| 675185 | 1 | 1 | 1 | 1.00 | 1.00 |
| 673478 | 1 | 1 | 1 | 1.00 | 1.00 |
| 615000 | 1 | 1 | 1 | 1.00 | 0.96 |
| 2276396 | 1 | 1 | 1 | 0.96 | 1.00 |

### P-value

[0381]

| X | 1894003 | 675185 | GP11.079035103 | 615000 | 2276396 |
|---|---|---|---|---|---|
| 1894003 | 1 | 0 | 0 | 0 | 0 |
| 675185 | 0 | 1 | 0 | 0 | 0 |
| GP11.079035103 | 0 | 0 | 1 | 0 | 0 |
| 615000 | 0 | 0 | 0 | 1 | 0 |
| 2276396 | 0 | 0 | 0 | 0 | 1 |

### Haplotype by GYNGroup

### PHASE Haplotypes (All)

[0382]

| | Case | Case(%) | Case.X\hat{ }2 | Control | Control(%) | Control.X\hat{ }2 | OR | In.OR |
|---|---|---|---|---|---|---|---|---|
| TTCGC | 0 | 0.00 | 0.48 | 1 | 0.10 | 0.44 | 0.0000 | −Inf |
| TTCGG | 0 | 0.00 | 0.48 | 1 | 0.10 | 0.44 | 0.0000 | −Inf |
| CGTGC | 452 | 43.97 | 0.21 | 509 | 49.51 | 0.19 | 0.8001 | −0.2230 |
| TTCTG | 14 | 1.36 | 0.18 | 12 | 1.17 | 0.17 | 1.1690 | 0.1561 |
| TTCTC | 28 | 2.72 | 4.57 | 11 | 1.07 | 4.23 | 2.5887 | 0.9512 |

Pearson Chi-squared Test = 11.4058, DF = 4, P-value = 0.02236
Permutation Test P-value = 0.14

### PHASE Haplotypes (Low Frequency Excluded)

[0383]

| | Case | Case(%) | Case.X\hat{ }2 | Control | Control(%) | Control.X\hat{ }2 | OR | In.OR |
|---|---|---|---|---|---|---|---|---|
| CGTGC | 452 | 44.05 | 0.25 | 509 | 49.61 | 0.23 | 0.7998 | −0.2234 |
| TTCTG | 14 | 1.36 | 0.18 | 12 | 1.17 | 0.16 | 1.1690 | 0.1561 |
| TTCTC | 28 | 2.73 | 4.53 | 11 | 1.07 | 4.21 | 2.5888 | 0.9512 |

Pearson Chi-squared Test = 9.5506, DF = 2, P-value = 0.008435

### haplo.score Haplotypes

[0384]

| | Hap. Freq | Score | P. X\hat{ }2 | P. Sim |
|---|---|---|---|---|
| CGTGC | 0.9410 | −2.0316 | 0.0422 | 0.0531 |
| TTCTG | 0.0248 | 0.3232 | 0.7465 | 0.8344 |
| TTCTC | 0.0321 | 2.6973 | 0.0070 | 0.0093 |

Global Score = 9.1386, DF = 3, Global P. X\hat{ }2 = 0.0275, Global P. Sim = 0.0212

### Example 15

### GALE Region Proximal SNPs

[0385] It has been discovered that a polymorphic variation (rs4237) in the HT014/LOC148902/LYPLA2/GALE region is associated with the occurrence of breast cancer (see Examples 1 and 2). Subsequently, SNPs proximal to the incident SNP (rs4237) were identified and allelotyped in breast cancer sample sets and control sample sets as described in Examples 1 and 2. Approximately 175 allelic variants located within the HT014/LOC148902/LYPLA2/GALE region were identified and allelotyped. The polymorphic variants are set forth in Table 37. The chromosome position provided in column four of Table 37 is based on Genome “Build 34” of NCBI's GenBank.

TABLE 37

| | Position in | | Chromosome | Allele | Genome | Deduced |
|---|---|---|---|---|---|---|
| dbSNP rs# | SEQ ID NO: 5 | Chromosome | Position | Variants | Letter | Iupac |
| 627451 | 215 | 1 | 23536215 | g/a | g | R |
| 12082331 | 385 | 1 | 23536385 | g/c | g | S |
| 2267960 | 2019 | 1 | 23538019 | t/c | t | Y |
| 7519640 | 3112 | 1 | 23539112 | c/g | g | S |
| 12086741 | 3437 | 1 | 23539437 | g/a | g | R |
| 3934189 | 4326 | 1 | 23540326 | t/c | t | Y |
| 12135415 | 4523 | 1 | 23540523 | a/g | a | R |
| 12088267 | 4645 | 1 | 23540645 | a/g | g | R |
| 12084665 | 4646 | 1 | 23540646 | c/t | t | Y |
| 550850 | 5830 | 1 | 23541830 | t/c | c | Y |
| 557227 | 6556 | 1 | 23542556 | g/t | g | K |
| 12137502 | 6568 | 1 | 23542568 | t/a | a | W |
| 12118858 | 6570 | 1 | 23542570 | c/t | c | Y |
| 2294495 | 9351 | 1 | 23545351 | c/t | c | Y |
| 12401650 | 10874 | 1 | 23546874 | c/t | c | Y |
| 2235541 | 10926 | 1 | 23546926 | c/t | c | Y |
| 520713 | 11462 | 1 | 23547462 | g/a | g | R |
| 550252 | 12415 | 1 | 23548415 | t/c | c | Y |
| HT014-AA | 12668 | 1 | 23548668 | a/g | g | R |
| 12093683 | 13886 | 1 | 23549886 | g/c | g | S |
| 10917421 | 15005 | 1 | 23551005 | g/a | g | R |
| 2744873 | 15387 | 1 | 23551387 | a/t | t | W |
| 12091764 | 15639 | 1 | 23551639 | g/a | a | R |
| HT014-AB | 15761 | 1 | 23551761 | a/t | t | W |
| 2076345 | 16969 | 1 | 23552969 | c/t | c | Y |
| 2076346 | 17124 | 1 | 23553124 | t/c | t | Y |
| 2473379 | 17369 | 1 | 23553369 | a/g | a | R |
| 6679300 | 17523 | 1 | 23553523 | c/g | g | S |
| 11811395 | 18158 | 1 | 23554158 | t/a | t | W |
| 8179467 | 18220 | 1 | 23554220 | t/a | a | W |
| 8179468 | 18224 | 1 | 23554224 | t/a | a | W |
| 10917423 | 18538 | 1 | 23554538 | a/g | g | R |
| 7536699 | 18810 | 1 | 23554810 | g/c | g | S |
| 3215497 | 20282 | 1 | 23556282 | —/t | t | N |
| 1000213 | 20495 | 1 | 23556495 | c/a | t | K |
| 1000212 | 20633 | 1 | 23556633 | c/t | g | R |
| 1000211 | 20659 | 1 | 23556659 | g/a | c | Y |
| 1045017 | 21603 | 1 | 23557603 | a/g | g | R |
| 12059520 | 24075 | 1 | 23560075 | c/g | g | S |
| 2143118 | 24191 | 1 | 23560191 | c/t | c | Y |
| 12126804 | 25010 | 1 | 23561010 | t/c | c | Y |
| 533276 | 25124 | 1 | 23561124 | c/t | c | Y |
| 12402174 | 25145 | 1 | 23561145 | g/c | g | S |
| 2864110 | 25222 | 1 | 23561222 | c/a | t | K |
| 11581873 | 25288 | 1 | 23561288 | t/c | c | Y |
| 12062449 | 26080 | 1 | 23562080 | g/a | g | R |
| 12033190 | 26556 | 1 | 23562556 | c/t | c | Y |
| 10157566 | 27416 | 1 | 23563416 | t/c | t | Y |
| 486746 | 27432 | 1 | 23563432 | c/g | c | S |
| 11802707 | 29841 | 1 | 23565841 | a/g | g | R |
| 6668550 | 29955 | 1 | 23565955 | c/a | a | M |
| 7410946 | 30160 | 1 | 23566160 | a/g | g | R |
| 7410970 | 30294 | 1 | 23566294 | g/c | g | S |
| 6657558 | 31039 | 1 | 23567039 | c/g | g | S |
| 2143119 | 32071 | 1 | 23568071 | t/c | c | Y |
| 7514394 | 33698 | 1 | 23569698 | t/c | c | Y |
| 11591202 | 35555 | 1 | 23571555 | a/c | a | M |
| 6673991 | 36658 | 1 | 23572658 | a/g | a | R |
| HT014-AC | 37720 | 1 | 23573720 | g/c | c | S |
| 12034848 | 38304 | 1 | 23574304 | c/t | c | Y |
| 2502984 | 39008 | 1 | 23575008 | t/c | t | Y |
| 3831910 | 39985 | 1 | 23575985 | a/— | a | N |
| 11379444 | 39989 | 1 | 23575989 | —/t | t | N |
| 725119 | 40683 | 1 | 23576683 | t/a | a | W |
| 10917425 | 42158 | 1 | 23578158 | t/c | c | Y |
| 12077788 | 44369 | 1 | 23580369 | c/g | c | S |
| 12077830 | 44503 | 1 | 23580503 | c/g | c | S |
| 2473380 | 45382 | 1 | 23581382 | c/t | t | Y |
| 2473381 | 46171 | 1 | 23582171 | a/c | a | M |
| 11545132 | 47276 | 1 | 23583276 | g/t | g | K |
| 1046924 | 47299 | 1 | 23583299 | t/c | t | Y |
| 4237 | 47604 | 1 | 23583604 | a/g | g | R |
| 4375317 | 48462 | 1 | 23584462 | g/a | g | R |
| 11584220 | 50786 | 1 | 23586786 | a/c | c | M |
| 2232975 | 51057 | 1 | 23587057 | g/t | g | K |
| 2502985 | 51310 | 1 | 23587310 | g/a | g | R |
| 3835423 | 51996 | 1 | 23587996 | c/— | g | N |
| 2232976 | 52546 | 1 | 23588546 | t/a | t | K |
| 2232977 | 52602 | 1 | 23588602 | c/t | c | Y |
| 2232978 | 52725 | 1 | 23588725 | g/a | g | R |
| 2232979 | 52858 | 1 | 23588858 | a/c | c | M |
| 2232980 | 52935 | 1 | 23588935 | t/g | g | K |
| 2232981 | 52948 | 1 | 23588948 | c/t | c | Y |
| 2232982 | 53102 | 1 | 23589102 | t/c | c | Y |
| 2232983 | 54160 | 1 | 23590160 | c/a | c | M |
| 2232984 | 54794 | 1 | 23590794 | c/t | c | Y |
| 2232985 | 54798 | 1 | 23590798 | t/c | c | Y |
| 2232986 | 54853 | 1 | 23590853 | t/c | c | Y |
| 2745 | 55422 | 1 | 23591422 | a/g | c | Y |
| 2744 | 55460 | 1 | 23591460 | c/g | g | S |
| 11546127 | 55645 | 1 | 23591645 | g/t | g | K |
| 1049988 | 55660 | 1 | 23591660 | t/c | g | R |
| 1803613 | 55729 | 1 | 23591729 | c/t | g | R |
| 1803612 | 55736 | 1 | 23591736 | t/g | c | M |
| HT014-AD | 55821 | 1 | 23591821 | t/c | c | Y |
| 3209973 | 55970 | 1 | 23591970 | t/g | c | M |
| 3180545 | 56150 | 1 | 23592150 | c/a | c | M |
| 3180383 | 56167 | 1 | 23592167 | a/g | g | R |
| 3177814 | 56171 | 1 | 23592171 | g/t | g | K |
| 3180546 | 56210 | 1 | 23592210 | g/t | t | K |
| 3180547 | 56213 | 1 | 23592213 | a/c | c | M |
| 11805398 | 56259 | 1 | 23592259 | t/g | g | K |
| 760941 | 56461 | 1 | 23592461 | t/c | c | Y |
| 3177813 | 56480 | 1 | 23592480 | t/c | c | Y |
| 3180548 | 56486 | 1 | 23592486 | a/g | g | R |
| 3179864 | 56499 | 1 | 23592499 | a/g | g | R |
| 3177812 | 56510 | 1 | 23592510 | t/c | c | Y |
| 3179863 | 56543 | 1 | 23592543 | g/t | g | K |
| 6692104 | 56827 | 1 | 23592827 | g/c | g | S |
| 3180549 | 56846 | 1 | 23592846 | g/c | c | S |
| 3179862 | 56859 | 1 | 23592859 | c/a | c | M |
| 3177811 | 56870 | 1 | 23592870 | g/c | c | S |
| 3177810 | 56890 | 1 | 23592890 | c/a | c | M |
| 3180382 | 56907 | 1 | 23592907 | a/c | c | M |
| 11546126 | 57767 | 1 | 23593767 | c/t | a | R |
| 7551384 | 58774 | 1 | 23594774 | c/g | g | S |
| 12141511 | 59444 | 1 | 23595444 | t/c | c | Y |
| 2473382 | 59452 | 1 | 23595452 | g/a | g | R |
| 12038166 | 59753 | 1 | 23595753 | a/g | g | R |
| 6666908 | 60766 | 1 | 23596766 | c/a | c | M |
| 12041159 | 61135 | 1 | 23597135 | g/c | c | S |
| 12031592 | 61339 | 1 | 23597339 | a/c | a | M |
| 1062598 | 61922 | 1 | 23597922 | c/t | g | R |
| 11714 | 61942 | 1 | 23597942 | c/t | c | Y |
| 3203593 | 61958 | 1 | 23597958 | a/g | c | Y |
| 1042436 | 62068 | 1 | 23598068 | t/c | g | R |
| 2076343 | 62601 | 1 | 23598601 | a/g | a | R |
| 12131539 | 62661 | 1 | 23598661 | g/a | g | R |
| 11583935 | 62882 | 1 | 23598882 | t/g | g | K |
| 12140263 | 63949 | 1 | 23599949 | a/c | c | M |
| 3835225 | 64732 | 1 | 23600732 | —/ag | g | N |
| 2473374 | 65145 | 1 | 23601145 | c/t | t | Y |
| 2256179 | 65780 | 1 | 23601780 | a/g | g | R |
| 974698 | 66260 | 1 | 23602260 | c/t | c | Y |
| 1018396 | 67087 | 1 | 23603087 | c/t | g | R |
| 719399 | 67937 | 1 | 23603937 | g/a | c | Y |
| 719400 | 68196 | 1 | 23604196 | g/a | t | Y |
| 2502986 | 68767 | 1 | 23604767 | g/t | g | K |
| 6679378 | 69482 | 1 | 23605482 | t/c | c | Y |
| 2473375 | 70020 | 1 | 23606020 | c/t | c | Y |
| 2473376 | 72759 | 1 | 23608759 | a/g | g | R |
| 12136455 | 72911 | 1 | 23608911 | g/c | g | S |
| 2502987 | 73331 | 1 | 23609331 | c/a | a | M |
| 11551767 | 74250 | 1 | 23610250 | c/t | g | R |
| 11591205 | 74486 | 1 | 23610486 | t/c | c | Y |
| 12083298 | 74921 | 1 | 23610921 | a/t | a | W |
| 12138604 | 75065 | 1 | 23611065 | g/a | g | R |
| 12136042 | 75077 | 1 | 23611077 | c/t | t | Y |
| 12138606 | 75078 | 1 | 23611078 | g/a | g | R |
| 12136045 | 75096 | 1 | 23611096 | c/t | t | Y |
| 12116596 | 75108 | 1 | 23611108 | c/g | c | S |
| 12138610 | 75121 | 1 | 23611121 | a/g | g | R |
| 12136069 | 75136 | 1 | 23611136 | t/c | t | Y |
| 12116617 | 75150 | 1 | 23611150 | c/t | c | Y |
| 7540056 | 75594 | 1 | 23611594 | g/a | a | R |
| 12044452 | 77120 | 1 | 23613120 | t/g | g | K |
| 2076344 | 77407 | 1 | 23613407 | g/a | a | R |
| 11588187 | 78522 | 1 | 23614522 | t/a | t | W |
| 6696932 | 78656 | 1 | 23614656 | t/a | a | W |
| 12025531 | 78902 | 1 | 23614902 | t/c | c | Y |
| 6682888 | 78911 | 1 | 23614911 | g/a | g | R |
| 2982390 | 81305 | 1 | 23617305 | g/c | g | S |
| 2179394 | 81717 | 1 | 23617717 | a/t | a | W |
| 2473377 | 81735 | 1 | 23617735 | c/t | t | Y |
| 2179395 | 81840 | 1 | 23617840 | t/c | t | Y |
| 2502978 | 82511 | 1 | 23618511 | c/t | c | Y |
| 2502979 | 82790 | 1 | 23618790 | a/c | c | M |
| 6698535 | 83323 | 1 | 23619323 | t/a | t | W |
| 2502980 | 83464 | 1 | 23619464 | t/c | c | Y |
| 10554242 | 83916-83920 | 1 | 23619916\hat{ } | cact/— | cact | NNNN |
| | | | 23619919 | | | |
| 6697805 | 85471 | 1 | 23621471 | a/c | c | M |
| 6424114 | 85688 | 1 | 23621688 | c/a | c | M |
| 5773058 | 86196 | 1 | 23622196 | —/tt | g | N |
| 4649114 | 86323 | 1 | 23622323 | t/a | g | K |
| 6424115 | 86706 | 1 | 23622706 | a/g | a | R |

Assay for Verifying and Allelotyping SNPs

[0386] The methods used to verify and allelotype the proximal SNPs of Table 37 are the same methods described in Examples 1 and 2 herein. The PCR primers and extend primers used in these assays are provided in Table 38 and Table 39, respectively.

TABLE 38

| | | |
|---|---|---|
| dbSNP rs# | Forward PCR primer | Reverse PCR primer |

| | | |
|---|---|---|
| 627451 | ACGTTGGATGATCTTCTGACCTCGTGATCC | ACGTTGGATGCAACAGAGTGAGACCCTGTC |
| 12082331 | ACGTTGGATGGGGTTCATGCCGTTCTCCTG | ACGTTGGATGAAATTAGCCGGGTGTAGTGG |
| 2267960 | ACGTTGGATGCACCTAGCATCATCTAGACC | ACGTTGGATGTTAGGGTACCAAGTGGATGG |
| 7519640 | ACGTTGGATGGCGTTGGCATTTATAAGGCC | ACGTTGGATGTCTCCAGGGTCTACTTCAAG |
| 12086741 | ACGTTGGATGAACTTGGAGCGCCGACTCCG | ACGTTGGATGATGCACGGAGGGCGGAGCT |
| 3934189 | ACGTTGGATGACCAGAGAAGTGAGTGACAG | ACGTTGGATGTTTTGTTGTTTATTGTAC |
| 12135415 | ACGTTGGATGATCTCGGCTCACTGCAACCT | ACGTTGGATGGCGCCTACAATACCAGCTAC |
| 12088267 | ACGTTGGATGTAGTAGAGACAGGGTTTCAC | ACGTTGGATGTGACGGAGAATGCCAAACAC |
| 12084665 | ACGTTGGATGTAGTAGAGACAGGGTTTCAC | ACGTTGGATGTGACGGAGAATGCCAAACAC |
| 550850 | ACGTTGGATGTCTCCCTTAAGTGAGCCAAG | ACGTTGGATGTTCCACACCTGTGTTCATGG |
| 557227 | ACGTTGGATGTGTAACACAGGACGAGGATC | ACGTTGGATGATGGCACCATTGCACTCCAG |
| 12137502 | ACGTTGGATGAGCCTGGACAACAAGAGCAA | ACGTTGGATGTGTAACACAGGACGAGGATC |
| 12118858 | ACGTTGGATGAGCCTGGACAACAAGAGCAA | ACGTTGGATGTGTAACACAGGACGAGGATC |
| 2294495 | ACGTTGGATGGGAATTAGATGGTTATAATGG | ACGTTGGATGCACCACTTTAACTAAAGTAC |
| 12401650 | ACGTTGGATGAGAAGAGCAATTCCCGAAAG | ACGTTGGATGTCCAGGTTTCTTGGTAGTCC |
| 2235541 | ACGTTGGATGGGGACTACCAAGAAACCTGG | ACGTTGGATGTCCACGAGCTCCGAGAGTTTCCTATG |
| 520713 | ACGTTGGATGAGGGAGGCAAACACTTCTTC | ACGTTGGATGACAATGCAAGGGAGAAACCG |
| 550252 | ACGTTGGATGAGGCAGTGGACGGTAATTGG | ACGTTGGATGTCCACGCTGCAGGTGCCTGATGTGTT |
| HT014-AA | ACGTTGGATGTTCTAAACCAACCAGGCGTG | ACGTTGGATGTTACCTAAGGTGATCTGCCC |
| 12093683 | ACGTTGGATGTAAGCTCCTGTAATCCCAGC | ACGTTGGATGAGGCTGATCTCGAACTCTTG |
| 10917421 | ACGTTGGATGATATTAGCCAGCTGTGGTGG | ACGTTGGATGACTGCATCCTTGAACTCCTG |
| 2744873 | ACGTTGGATGACCTAGGAGTGACCAGTTTC | ACGTTGGATGGGGAGTTATTTTTTTCCTAG |
| 12091764 | ACGTTGGATGTGGGTTCAAGCGATTCTCAC | ACGTTGGATGTAAAATAGCTGGGCGTGGTG |
| HT014-AB | ACGTTGGATGGAAACCAGAACCAGGACATC | ACGTTGGATGACAGAGCAAGACTCTGTCTC |
| 2076345 | ACGTTGGATGATGGGAAGCAGCCATGCTTC | ACGTTGGATGTCCACGTGGTGCTTGGGCCATCATAG |
| 2076346 | ACGTTGGATGGCAGTCCACAAAATGTAATAC | ACGTTGGATGAAGTAACTTGGAGTTCCTGC |
| 2473379 | ACGTTGGATGTAATCCCAGCACTTTGGCAG | ACGTTGGATGTCTCATTATGTTGTCCAGGC |
| 6679300 | ACGTTGGATGTTTUTGAGATGGAGTCTCGC | ACGTTGGATGAATGGCATGAACCTGGAAGG |
| 11811395 | ACGTTGGATGAATGACAGGCCCTCTTACTG | ACGTTGGATGAGAGTGAGACTCTGTCTCCA |
| 8179467 | ACGTTGGATGAATGACAGGCCCTCTTACTG | ACGTTGGATGAGAGTGAGACTCTGTCTCCA |
| 8179468 | ACGTTGGATGTATATCTAATTGGGTCTTCC | ACGTTGGATGAGAGTGAGACTCTGTCTCCA |
| 10917423 | ACGTTGGATGTACCAGCGTGAACCACCATG | ACGTTGGATGCATCCCCTTAGGATACTGGG |
| 7536699 | ACGTTGGATGGCCTCACAAATAGCCAAACC | ACGTTGGATGTTGCATAGCCACCTTAGACC |
| 3215497 | ACGTTGGATGTCATCCTTTTTGCGAGTCCC | ACGTTGGATGTCAATCTCCCAAGGTTCTGC |
| 1000213 | ACGTTGGATGGTGATTCACAGAGAACAAGAG | ACGTTGGATGGC11TTTGTAGCCCTGAAGG |
| 1000212 | ACGTTGGATGTCAGCAGCAAAGTCCTCTTC | ACGTTGGATGAGGCTGTAATGCTATGTTGG |
| 1000211 | ACGTTGGATGGGAAGAACACAACTGTTGGC | ACGTTGGATGCCTGCCTTAAACACACTCAG |
| 1045017 | ACGTTGGATGACATCAGGGATGTGACTTGG | ACGTTGGATGTCCACGCTGCTCTGCAGCCATTTTAG |
| 12059520 | ACGTTGGATGCCACCACGCCCAGCTAATTT | ACGTTGGATGAAAGCGGGCAGATGGCTTGA |
| 2143118 | ACGTTGGATGCGTGCCCAGCCTAAAAATTC | ACGTTGGATGTTCTGCTGGGCATCAGTTAC |
| 12126804 | ACGTTGGATGAATTCTGTGTCTGGTGAGGG | ACGTTGGATGGCTCCTTGTTCTCCACCATG |
| 533276 | ACGTTGGATGGCCTCTGGAACTGTGAGAAG | ACGTTGGATGGTGTCTCAGTCATTTCAGGC |
| 12402174 | ACGTTGGATGAATCGCTTAGTGTCTCAGTC | ACGTTGGATGATGTTTGTTGCCTAAGCCAG |
| 2864110 | ACGTTGGATGATTCCAGCCTGGGTGACAGA | ACGTTGGATGTGACTGAGACACTAAGCGAT |
| 11581873 | ACGTTGGATGGCAGGAGAATCACATGAACC | ACGTTGGATGGCAGTAGCTTGATCACTCTC |
| 12062449 | ACGTTGGATGCGCCTGGCCTAATATTTTAT | ACGTTGGATGGTGAGAGATTACTTGAGTCC |
| 12033190 | ACGTTGGATGAGCCCGGGTGAAAGAGCAAG | ACGTTGGATGATTCATCTGCCTTGACCTC |
| 10157566 | ACGTTGGATGGCTAACACGGTGAAACTCCG | ACGTTGGATGTCCCGAGTAGTTGGGACTAC |
| 486746 | ACGTTGGATGGAGTAGTTGGGACTACAGGC | ACGTTGGATGTAACACGGTGAAACTCCGTC |
| 11802707 | ACGTTGGATGAGCCTGACCATCATGGTGAA | ACGTTGGATGAATTCTCCTGCCTCTTCCTC |
| 6668550 | ACGTTGGATGGCCTAGGTGACAGAAGACTC | ACGTTGGATGAGCCACAGCACCCAGACTTT |
| 7410946 | ACGTTGGATGTGGTGGTGGGCACCTGTGGT | ACGTTGGATGAAGCTCCATCTCCCGGGTTC |
| 7410970 | ACGTTGGATGAGTGATTCTTCTGCTTCAGC | ACGTTGGATGGACAGAGTGAGACTCTGTCT |
| 6657558 | ACGTTGGATGCTTGCAGTGAGCTGAGATCG | ACGTTGGATGGAGCTACCGAGTCTATGTTC |
| 2143119 | ACGTTGGATGATTTCTAGGACTACCCTGGG | ACGTTGGATGAGAGTGAGACCCTATCTCCA |
| 7514394 | ACGTTGGATGAGTGTGAGCACACAGGTTAG | ACGTTGGATGCCCCATTCTCTCCATATCTC |
| 11591202 | ACGTTGGATGTAATTCGCATGATCCTGTGG | ACGTTGGATGTGAGACCATCCCAAACTTTC |
| 6673991 | ACGTTGGATGTCAGGAGATCCTTCCACTTC | ACGTTGGATGTAGGGAGACCCCATCTTTAC |
| HT014-AC | ACGTTGGATGGCAATTAAAGAACTCAGCAGG | ACGTTGGATGATCTTTTGACCTCGTGATCC |
| 12034848 | ACGTTGGATGGTCCTACGTCAGTTCCGCTC | ACGTTGGATGGCATGCGCGTGGGGAGAAG |
| 2502984 | ACGTTGGATGTGGGAACCACCTTTCATCTC | ACGTTGGATGTCCACGACCATTGGTGCTAATGGCTG |
| 3831910 | ACGTTGGATGAGGGGAAATATTAAACCCGG | ACGTTGGATGCTCAAAGGAGCTCCTAATTC |
| 11379444 | ACGTTGGATGAGGGGAAATATTAAACCCGG | ACGTTGGATGCAAAGGAGCTCCTAATTCTC |
| 725119 | ACGTTGGATGAATTCTCCTGCCTCACCCTC | ACGTTGGATGTGGCCAACCTGGTAAAACCC |
| 10917425 | ACGTTGGATGGGTCTTGAACTCCTGACCTC | ACGTTGGATGCGCAGTGGCTTACACCTATA |
| 12077788 | ACGTTGGATGAGGTTCATGCCATTCTCCTG | ACGTTGGATGTAACACGGTGAAACCCCGTC |
| 12077830 | ACGTTGGATGATTACAGGTGTGAGCCACTG | ACGTTGGATGGAAGAGGCCTCGATATTAGC |
| 2473380 | ACGTTGGATGCTGTAGTCCCAGCTACTCAG | ACGTTGGATGTCTCAGCTCACTGCAACCTC |
| 2473381 | ACGTTGGATGAGCTCCAGCTTGTAAAAGCC | ACGTTGGATGTTGCCTGTCCAAAGGAGAAG |
| 11545132 | ACGTTGGATGGTAACCTGATGGACCCTATG | ACGTTGGATGACGAGGTGACCATCTGCAAT |
| 1046924 | ACGTTGGATGCCAGCCCTTAGGAAATAAAG | ACGTTGGATGATTACGAAGCATCTGCCAAC |
| 4237 | ACGTTGGATGGCTGTGGAAATTGGGTCTTG | ACGTTGGATGTCCACGCACATGGCCACATTAACTGG |
| 4375317 | ACGTTGGATGTGAGTAGCTGGGACTACAGG | ACGTTGGATGCACGGTGAAACCGTCTCTAC |
| 11584220 | ACGTTGGATGAACTTTACCACCTTCCCATC | ACGTTGGATGGAATAGGGCATGAAAGCCAG |
| 2232975 | ACGTTGGATGAAGTAGCCTGGCCGACAGTA | ACGTTGGATGCCAACATGGCAGCTTCTATC |
| 2502985 | ACGTTGGATGAAGTCCCCAAGACTGGACAG | ACGTTGGATGTCGGGAGGGTCCCGGAGAG |
| 3835423 | ACGTTGGATGAAAGCGTAAGAACTCCACCC | ACGTTGGATGAGGGCTCGTTTGCAGTCAGT |
| 2232976 | ACGTTGGATGATTCTTTGTGCCCAGGACAG | ACGTTGGATGAAGAGCAAAACCAGGCACAG |
| 2232977 | ACGTTGGATGTGTCCTGTGCCTGGTTTTGC | ACGTTGGATGTACCACACATACACCACACG |
| 2232978 | ACGTTGGATGTGTCTGGCCGTGGGTGAAAG | ACGTTGGATGAACACCATGTCTGTGCCCCT |
| 2232979 | ACGTTGGATGACGTTGGATGAACTCTGCCC | ACGTTGGATGGAGTATCCTGAGGCCAGCAG |
| | ACCCCTCC | |
| 2232980 | ACGTTGGATGGTGGGCAGAAGTTGGAGGAC | ACGTTGGATGGGAAAAGGATGGGAAATGGG |
| 2232981 | ACGTTGGATGAGAAGTTGGAGGACCTAGGG | ACGTTGGATGTTACCCTGTGTCTCCAAGTC |
| 2232982 | ACGTTGGATGATGTACTTGACGTGAGGGAG | ACGTTGGATGTTCTCTTCCTACCACATCGG |
| 2232983 | ACGTTGGATGAGGCTTTTCACAGGTGAGGG | ACGTTGGATGTGGAGGGAGGAGAGAGAGG |
| 2232984 | ACGTTGGATGGTGGCACCATCTTGGATCTG | ACGTTGGATGGTGGGAAAAGGACAGGTCAG |
| 2232985 | ACGTTGGATGAGAGGCCTGTGGGAAAAGGA | ACGTTGGATGGTGGCACCATCTTGGATCTG |
| 2232986 | ACGTTGGATGAGGTGGCTAAGGCCAGGAAG | ACGTTGGATGCCTTCCTGACCTGTCCTTTT |
| 2745 | ACGTTGGATGCACCCAAAAACCACATGGAG | ACGTTGGATGTCCACGACTTTGTCCCCACTCTAGAG |
| 2744 | ACGTTGGATGTAATTTTATCGGAATCCAGG | ACGTTGGATGTCCACGCTGTCTCCATGTGGTTTTTG |
| 11546127 | ACGTTGGATGAGGACCCCCAAGAGTGAGTGA | ACGTTGGATGGGAAAGCTCTTTCAGAGCAA |
| 1049988 | ACGTTGGATGATAAATGAGTGCCTGGGAGG | ACGTTGGATGTCCAAGAGTTCATCAGGACC |
| 1803613 | ACGTTGGATGTCCACTGACCAGGAGGCC | ACGTTGGATGTGGACCCTGTGGAAGATA |
| 1803612 | ACGTTGGATGCCAAGGCTCCACTGACCA | ACGTTGGATGTGTGGAAGATAAGAGTTAG |
| HT014-AD | ACGTTGGATGAGCCTCTGGCAGGAACTCAG | ACGTTGGATGTCCACGTCATGCCTGGTGGGCTAAGC |
| 3209973 | ACGTTGGATGAGCACACACCTCGCCGTGTT | ACGTTGGATGTTGCGTGCCAAAGCCTGAAG |
| 3180545 | ACGTTGGATGACATCCTGTCCAGCCCTAAG | ACGTTGGATGTGATGTGGCAGCCTGTTACG |
| 3180383 | ACGTTGGATGTGTCCAGCCCTAAGGCTGCT | ACGTTGGATGGTGATGTGGCAGCCTGTTAC |
| 3177814 | ACGTTGGATGGTGATGTGGCAGCCTGTTAC | ACGTTGGATGTGTCCAGCCCTAAGGCTGCT |
| 3180546 | ACGTTGGATGGCTAAGCTCCAACTACCTCC | ACGTTGGATGTAACAGGCTGCCACATCACC |
| 3180547 | ACGTTGGATGGCTAAGCTCCAACTACCTCC | ACGTTGGATGTAACAGGCTGCCACATCACC |
| 11805398 | ACGTTGGATGGGGATCTGCAAGACAGGAGG | ACGTTGGATGACTTCTGCTTCTTAAAGAC |
| 760941 | ACGTTGGATGAGAAGGCCTCTGGGAAGAAG | ACGTTGGATGTCCACGAAAGCTGCTCTGTTGCTGAG |
| 3177813 | ACGTTGGATGAGTGCTGCAGATGGTCCAGG | ACGTTGGATGAGGTGGGTGAGGTGGGTGG |
| 3180548 | ACGTTGGATGACGTTGGATGAGGTGGGTGAG | ACGTTGGATGATTCAGTGCTGCAGATGGTC |
| | GTGGGTGG | |
| 3179864 | ACGTTGGATGGGCCTACCTTCTTCCCAGAG | ACGTTGGATGGCTATTCAGTGCTGCAGATG |
| 3177812 | ACGTTGGATGACGGGCACAGGCTATTCAGT | ACGTTGGATGTTCTTCCCAGAGGCCTTCTC |
| 3179863 | ACGTTGGATGGCTCCATAAACCCTGTTCTC | ACGTTGGATGCCATCTGCAGCACTGAATAG |
| 6692104 | ACGTTGGATGTATGACACAGAGGATGGCAC | ACGTTGGATGTGTTCCCCCTGACTCTCCTT |
| 3180549 | ACGTTGGATGCCTGAATGTCTTTGGCAATG | ACGTTGGATGTTCCTGGCTCCCACTCCTAG |
| 3179862 | ACGTTGGATGTGGTCCTAGGCTCACCTGTG | ACGTTGGATGGGAGGCCCTGAATGTCTTTG |
| 3177811 | ACGTTGGATGTCTCCACCTCCAGGTGGCGAT | ACGTTGGATGCTCACCTGTGCCATCCTCTG |
| 3177810 | ACGTTGGATGCCATCCTCTGTGTCATAGTC | ACGTTGGATGAACTGACCTGATCTCCACCT |
| 3180382 | ACGTTGGATGATCTGGGACGAACTGACCTG | ACGTTGGATGTTGCCAAAGACATTCAGGGC |
| 11546126 | ACGTTGGATGAAGAACCTGGTGTTCAGCAG | ACGTTGGATGTAAGGGTTGGTACAACCACC |
| 7551384 | ACGTTGGATGATGTAGGCCACATCATCACG | ACGTTGGATGAAAACCCTGGGTTCCACCTC |
| 12141511 | ACGTTGGATGAGTTTACACCTAGCGAAGGC | ACGTTGGATGAAAATGGCAGCACGATTGGG |
| 2473382 | ACGTTGGATGCAGTTTACACCTAGCGAAGG | ACGTTGGATGAAAATGGCAGCACGATTGGG |
| 12038166 | ACGTTGGATGTCAGCCTCTGCCCATGCCA | ACGTTGGATGAGTAGCCTAAGTTGGGCGGG |
| 6666908 | ACGTTGGATGCGGGCCCTTTAAGTGCTGAC | ACGTTGGATGAACCCGAGTGACATGTTTCC |
| 12041159 | ACGTTGGATGTTGCAAACTGGACTTCCAGC | ACGTTGGATGGGTGTGTGCCAAACCATGAA |
| 12031592 | ACGTTGGATGTTCATCACGCAGGATGTCAC | ACGTTGGATGCGACGGCAGGTTAGAAAATG |
| 1062598 | ACGTTGGATGTGTGGAAAGTGGAGAGCTAC | ACGTTGGATGAAATCACATTCAGCGTGGAG |
| 11714 | AGCGGATAACAATTTCACACAGGCAGAGGC | ACGTTGGATGAGCGTGGAGATTTTCCAGAG |
| | CATTTGT | GGAAAG |
| 3203593 | ACGTTGGATGTCATGGAGGTTCTTCCCAAG | ACGTTGGATGTTCCAGAGATGCTGGAGTTG |
| 1042436 | ACGTTGGATGAGAAGTCAGAGAGCAAGGG | ACGTTGGATGTGGATGGAATCCGCGAGCTG |
| 2076343 | ACGTTGGATGTCATGGTATGCCCTCAACAC | ACGTTGGATGGCTGTCAAGGAAAAAGCCTG |
| 12131539 | ACGTTGGATGAGACAGACAGGAGCTCACAG | ACGTTGGATGAGCATGGACAGACAACTGTG |
| 11583935 | ACGTTGGATGGGCCCACAGAGGTAAAAAAC | ACGTTGGATGTTTCTGTCTGGCCCTTTCAG |
| 12140263 | ACGTTGGATGACACGCATGGGCATAAGAAG | ACGTTGGATGTTCCATGTTCCTGGTGTCTC |
| 3835225 | ACGTTGGATGTCAGAAAAGGTCTCCCTGAG | ACGTTGGATGTCTGCCAGCAGTATCTTTCC |
| 2473374 | ACGTTGGATGTCCCTCATGCTGCCTGAGAT | ACGTTGGATGTCCTGAAGCAGGTGGGAATG |
| 2256179 | ACGTTGGATGTGTCTCGAGCTTCACAGATC | ACGTTGGATGTCCACGAATCCAGGTGAGAGACATGG |
| 974698 | ACGTTGGATGAGGAGCCTCTCAAACGGAAC | ACGTTGGATGTTTCAGACTGAGCTGGGAAG |
| 1018396 | ACGTTGGATGAGGTGAGTCTGAGGCAAAAC | ACGTTGGATGTCCACGCTGCCATGAAACAGAGAAGC |
| 719399 | ACGTTGGATGTAACTCCCTTGACTGTCTCC | ACGTTGGATGAATGGTGGACACAGTCATGG |
| 719400 | ACGTTGGATGTAGGTGTCATGGCAGTGGAC | ACGTTGGATGTCCACGCACCCCAGGGATCATGAAAG |
| 2502986 | ACGTTGGATGGGATTGCTTGAGTCTGAGAG | ACGTTGGATGTCACTCTGTCATTCGGCTAG |
| 6679378 | ACGTTGGATGAGATGTGCAAATGGGCTTCC | ACGTTGGATGTTGTGATCTGCCCATCTCAG |
| 2473375 | ACGTTGGATGGCAACTTCACTTTTCTGAGC | ACGTTGGATGTAGCCTCAGTTGCCACAATC |
| 2473376 | ACGTTGGATGGGTACGGCTACAGAAAAGAG | ACGTTGGATGGTGACTAATCAAGTGCAGAC |
| 12136455 | ACGTTGGATGAATCACTTGAACCCAGGAGG | ACGTTGGATGTTTGAGACAGAGTCTCACTC |
| 2502987 | ACGTTGGATGAAGTGATTCTCCTGCCTCAG | ACGTTGGATGTAGTGGATAGAAACCCCGTC |
| 11551767 | ACGTTGGATGGGAAGTAGTCATCTTTGGAG | ACGTTGGATGCTGAAAACTCTCCTCTATGG |
| 11591205 | ACGTTGGATGACATGGTGAAACGCTGTCTC | ACGTTGGATGTGAGTAGCTGGGATTACAGG |
| 12083298 | ACGTTGGATGTCTCCTGACCTCATGATCTG | ACGTTGGATGAATCCCATACGACTGGTGAC |
| 12138604 | ACGTTGGATGGGTTCAAGTGATTCTCCCAC | ACGTTGGATGCAAAAAATTAGCCGGTCGTG |
| 12136042 | ACGTTGGATGAAAAAATTAGCCGGTCGTGG | ACGTTGGATGACCTCCCAGGTTCAAGTGAT |
| 12138606 | ACGTTGGATGCACCTCCCAGGTTCAAGTGA | ACGTTGGATGAAAATTAGCCGGTCGTGGTG |
| 12136045 | ACGTTGGATGAGGCTGAGGTGGGAGAATCA | ACGTTGGATGGTACAGTGGCATGATCTCGG |
| 12116596 | ACGTTGGATGTGAGGTGGGAGAATCACTTG | ACGTTGGATGTGGAGTACAGTGGCATGATC |
| 12138610 | ACGTTGGATGAATCACTTGAACCTGGGAGG | ACGTTGGATGTTAGACAGAGTCTTGCTCTG |
| 12136069 | ACGTTGGATGAGACAGAGTCTTGCTCTGTC | ACGTTGGATGAATCACTTGAACCTGGGAGG |
| 12116617 | ACGTTGGATGATCATGCCACTGTACTCCAG | ACGTTGGATGCTGTGTCTCTGTGTCTTCAC |
| 7540056 | ACGTTGGATGTGGCTAACACGATGAAACCC | ACGTTGGATGCCGGGTTCAAGTGATTCTCC |
| 12044452 | ACGTTGGATGCTATCTTTGTGAAGCAGGAG | ACGTTGGATGTCTAAAACCCTCTATGCCTG |
| 2076344 | ACGTTGGATGGCCCTAGCCCTCAATGAAAG | ACGTTGGATGCTTCTACTTGCTTCAAAGGC |
| 11588187 | ACGTTGGATGTTCTCCAGTTTCTCTCCCAC | ACGTTGGATGCAATACAGTGAGACTCCATC |
| 6696932 | ACGTTGGATGTTCCGGGTTCAAGCGATTCT | ACGTTGGATGTGGTGAAACCCCATCTCTAC |
| 12025531 | ACGTTGGATGAGTGAGTGCTTGTTGGAAAC | ACGTTGGATGATAGCAGTAAGCAGAAGCAG |
| 6682888 | ACGTTGGATGAGTGAGTGCTTGTTGGAAAC | ACGTTGGATGGCAGTAAGCAGAAGCAGAAC |
| 2982390 | ACGTTGGATGCCGTGCCTGGCCTTTTTTTA | ACGTTGGATGAAGATCGTGCCACTGTACTC |
| 2179394 | ACGTTGGATGTAGCAACCTGTTGGGTGGAG | ACGTTGGATGTGAGTTGCCTCCTCTGACCT |
| 2473377 | ACGTTGGATGTCTGACCTCCTGGAATCATC | ACGTTGGATGAAGGCAGGGAGCTTAGCAAC |
| 2179395 | ACGTTGGATGTTTGCAAAGGGTGGTCAGAG | ACGTTGGATGGGGTTCCTCATCTGGCTTTT |
| 2502978 | ACGTTGGATGACACTGTGTGATCCGCTAAG | ACGTTGGATGGTACATGTTCCAGCTGCTTC |
| 2502979 | ACGTTGGATGACTGTUATTTATCGAGCCCC | ACGTTGGATGTTCATGAGACAGGGACTTTG |
| 6698535 | ACGTTGGATGATTTGCCAGGCACATACAAG | ACGTTGGATGAGACAGAATGAGACTGTATC |
| 2502980 | ACGTTGGATGACCTGGTGAAATCCTGTCTC | ACGTTGGATGCCAGGTTCAAGTGATTCTCC |
| 10554242 | ACGTTGGATGAGTAATCTTCCCGAGGTGAC | ACGTTGGATGTTGTGCTCTAGAGCCACACT |
| 6697805 | ACGTTGGATGATCAAAACGGAGAGAGGCTG | ACGTTGGATGTGACCGATGGCTCGTCTGGTG |
| 6424114 | ACGTTGGATGTGGCTAACATGGCGAAACCC | ACGTTGGATGCACCACGCCCGGCTTTTTTT |
| 5773058 | ACGTTGGATGATGCTACACCGTCTGGAAAG | ACGTTGGATGTTATCTAGGTGTACTTTCTG |
| 4649114 | ACGTTGGATGGCCCTGAGGCAAAGAAAATG | ACGTTGGATGAGTGAGACTCCATCTCAAAC |
| 6424115 | ACGTTGGATGACCCCACTAATTGGTCACAG | ACGTTGGATGCAACACAGTGAGACTTCGTC |

[0387] TABLE 39

| | | |
|---|---|---|
| dbSNP rs# | Extend Primer | Term Mix |

| | | |
|---|---|---|
| 627451 | GGATTACAGGCATGAGCCAC | ACG |
| 12082331 | CCGTTCTCCTGCCTCAGC | ACT |
| 2267960 | GACCTTATAATCAGCATTGGAT | ACT |
| 7519640 | GGCCAGGGTCTGGCGCG | ACT |
| 12086741 | CGGCCTCCTCGCCGGAA | ACG |
| 3934189 | AAGAACGCGTTTAACTTAAT | ACT |
| 12135415 | GTCTCCCGGGTTCAGGCA | ACT |
| 12088267 | CCAGGCTGGTCTTGAACTCA | ACT |
| 12084665 | CAGGCTGGTCTTGAACTCAG | ACG |
| 550850 | AACAGAGTTACAGCAATGTCTA | ACT |
| 557227 | GGAGATGGAGTTITGCT | CGT |
| 12137502 | GGACAACAAGAGCAAAACTCC | CGT |
| 12118858 | GACAACAAGAGCAAAACTCCAT | ACG |
| 2294495 | GAATGTTCTGGAAACCA | ACG |
| 12401650 | AGCGCCCTCGGGATGCC | ACG |
| 2235541 | AAGAAACCTGGAAAGCCA | ACG |
| 520713 | CTGTCCTTCTCTTTCTTTA | ACG |
| 550252 | GACGGTAATTGGCCTGTATC | ACT |
| HT014-AA | CTGTAATCCCAGCACTTTGG | ACT |
| 12093683 | CACTTTAGGAGGCCAAGGCA | ACT |
| 10917421 | CCCAGCTACTTGGGAGGAT | ACG |
| 2744873 | TTGGTCTTCATCTTAGTAGT | CGT |
| 12091764 | ATTCTCACGCCTCAGCCTC | ACG |
| HT014-AB | TTGTGTACAAGCACTTTTCCAT | CGT |
| 2076345 | CCATGCTTCCGCCAGTAG | ACG |
| 2076346 | GAGTTAAAAACTAGTGCTGA | ACT |
| 2473379 | TCCCTTGAATCCAGGAGTTC | ACT |
| 6679300 | CCAGGCTGGAGTGCAGTG | ACT |
| 11811395 | GCCCTCTTACTGTTTTTTTATAG | CGT |
| 8179467 | CTAATTGGGTCTTCCAATTTATTT | CGT |
| 8179468 | GGGTCTTCCAATTTATTTATTT | CGT |
| 10917423 | GAACCACCATGCCTGGCC | ACT |
| 7536699 | CAAACCAGTAAACAGCA | ACT |
| 3215497 | CCCACCTTTTTGTTTTTTTTTTTT | ACG |
| 1000213 | CAAGAGATTAAAGTGCTGG | CGT |
| 1000212 | AAGTCCTCTTCCCAAGCCAA | ACG |
| 1000211 | TTGGGAAGAGGACTTTGCTG | ACG |
| 1045017 | TGTGACTTGGTGCGAAGA | ACT |
| 12059520 | CGTTGGCCAGGCTGGTCT | ACT |
| 2143118 | CTCAAGTTCAACAGTCATTT | ACG |
| 12126804 | GGCCCTCTTCTTGGTTTGCA | ACT |
| 533276 | TGCCTAAGCCAGTCAGT | ACG |
| 12402174 | TAGTGTCTCAGTCATTTCAGG | ACT |
| 2864110 | TGACAGAGTGAGACTTC | CGT |
| 11581873 | CACATGAACCCGGGAGGCA | ACT |
| 12062449 | ATCTCACTATGTTGCCCAGG | ACG |
| 12033190 | GTGAAAGAGCAAGACCCTGT | ACG |
| 10157566 | AGCCGAGCGTGGTGGCG | ACT |
| 486746 | CTCGCCACCACGCTCGG | ACT |
| 11802707 | GGTGTGAGCCTGTAATTCCA | ACT |
| 6668550 | GTGACAGAAGACTCCATCTC | CGT |
| 7410946 | CGGGAGGCTGAGGCAGGA | ACT |
| 7410970 | CGCACACCACCATACCCAG | ACT |
| 6657558 | CTGCACTCCAGCCTGGG | ACT |
| 2143119 | ACTACCCTGGGGCAGGTAA | ACT |
| 7514394 | CTGCATGCGTGGACACAAG | ACT |
| 11591202 | GCATGATCCTGTGGATTAGC | ACT |
| 6673991 | GAGCCACCATGCTGGGCTA | ACT |
| HT014-AC | GAACTCAGCAGGCCGGGC | ACT |
| 12034848 | TCCGCTCGACCCCACCC | ACG |
| 2502984 | CTTTCATCTCCCTAGGCTC | ACT |
| 3831910 | ACCCGGTAAGAAGAAAA | CGT |
| 11379444 | TATTAAACCCGGTAAGAAGAAAA | CGT |
| 725119 | CCAGGCCCAGCTAATTTTTGT | CGT |
| 10917425 | CTCCTGACCTCAGGTAATCC | ACT |
| 12077788 | CCTGCCACCACGCCCGG | ACT |
| 12077830 | TGAGCCACTGCGCCCGG | ACT |
| 2473380 | GCATGAGAGTCACTTGAACC | ACG |
| 2473381 | GTAAAAGCCAGGCAAAG | ACT |
| 11545132 | TCTGCTGGGTTGGCAGATG | CGT |
| 1046924 | GGGTAACCTGATGGACCCT | ACT |
| 4237 | GGCATCTGGCAGTCATGG | ACT |
| 4375317 | GCTCCCGCCACCGCACC | ACG |
| 11584220 | ACCTCTTAAGGCCTCGGGT | ACT |
| 2232975 | GCCGACAGTACGGAACC | CGT |
| 2502985 | TCACTCCCCACCCCCAT | ACG |
| 3835423 | GGTGCTCCACGCCCCCC | ACG |
| 2232976 | GTGCTGTGTGGGGCTGA | ACT |
| 2232977 | CTGGTTTTGCTCTTGAC | ACG |
| 2232978 | TGAAAGGGGACCCTTAC | ACG |
| 2232979 | AGGTAGCAGCCAAACAG | ACT |
| 2232980 | AGTTGGAGGACCTAGGG | ACT |
| 2232981 | AGGGGAAGCCTTCCTGT | ACG |
| 2232982 | GTGCCTGTAGGAGGGAC | ACT |
| 2232983 | GGTGAGTGAGCTGTGCC | CGT |
| 2232984 | GGTCGAGCCCCTGTCCC | ACG |
| 2232985 | AAAGGACAGGTCAGGAA | ACT |
| 2232986 | GGCCAGGAAGGAAGGCCC | ACT |
| 2745 | CACATGGAGACAGAAGAC | ACT |
| 2744 | TATCGGAATCCAGGACACAA | ACT |
| 11546127 | GGCTCTGGCACAAAACCTC | CGT |
| 1049988 | GAGGAGGAGGTTTTGTGCCA | ACT |
| 1803613 | ACCAGGAGGCCGAGGTCT | ACG |
| 1803612 | TCCACTGACCAGGAGGCC | ACT |
| HT014-AD | TGGAGCTGCTGGGGCCAA | ACT |
| 3209973 | CCTCGCCGTGTTGCAGGT | ACT |
| 3180545 | CTAAGGCTGCTGTCCACCC | CGT |
| 3180383 | CCAGCTCCTCTTGGGCCA | ACT |
| 3177814 | CAGCCTGTTACGCCAACCC | CGT |
| 3180546 | CCCGTACAAGGTGGTGGC | CGT |
| 3180547 | CAGATCCCGTACAAGGTGGT | ACT |
| 11805398 | CAGGAGGTAGTTGGAGCTTA | ACT |
| 760941 | AAGAAGGTAGGCCCCCCC | ACT |
| 3177813 | CTATGGAGAAGGCCTCTGG | ACT |
| 3180548 | CCTACCTTCTTCCCAGA | ACT |
| 3179864 | CAGAGGCCTTCTCCATA | ACT |
| 3177812 | ACAGGCTATTCAGTGCTGCA | ACT |
| 3179863 | GTGGGCCAGATCTACAA | CGT |
| 6692104 | ACAGGTGAGCCTAGGAC | ACT |
| 3180549 | ACTATGACACAGAGGATG | ACT |
| 3179862 | CCTGTGCCATCCTCTGTGT | CGT |
| 3177811 | GGAGGCCCTGAATGTCTTTG | ACT |
| 3177810 | CCAAAGACATTCAGGGCCTC | CGT |
| 3180382 | CTGATCTCCACCTCCAG | ACT |
| 11546126 | GTGTACGGGAACCCCCAG | ACG |
| 7551384 | CCAGACACACATTCCCC | ACT |
| 12141511 | AGACAGAACCCCTTCCTGC | ACT |
| 2473382 | CTGAGCAGACAGAACCC | ACG |
| 12038166 | CCGGTCACTCCTGGCTCA | ACT |
| 6666908 | GTGCTGACGGCCCACTC | CGT |
| 12041159 | CCTTAGTCCCGTGGGATCG | ACT |
| 12031592 | CTAGCTCTACTACTTTTCATTG | ACT |
| 1062598 | ATCTGCCAACTCCAGCATCT | ACG |
| 11714 | GATGCTGGAGTTGGCAGA | ACG |
| 3203593 | GGCCATTTGTGGAAAGTGGA | ACT |
| 1042436 | GCAGGGTGGAGCCGTGTA | ACT |
| 2076343 | CAGGGAAAACATCAGCATGG | ACT |
| 12131539 | CACAGGCAGCTGGTGCCC | ACG |
| 11583935 | GACAATTGTGAGGCAGAGAG | ACT |
| 12140263 | CAGGGTGACTTTGACAGTTCA | ACT |
| 3835225 | GGTGGCTTTCAGACTGGAAC | ACG |
| 2473374 | CTGCCTGAGATGGACCC | ACG |
| 2256179 | CTTCACAGATCAGAACAC | ACT |
| 974698 | CAGATCATCTCCCTCCC | ACG |
| 1018396 | GGCAAAACTTCATCCTGATCA | ACG |
| 719399 | GTCTCCCCAACACAGAG | ACG |
| 719400 | ACTTCCTGCATGACAGCAGA | ACG |
| 2502986 | AGTAAGCCGAGATCACA | CGT |
| 6679378 | CGGGCACGGTGGCTCAC | ACT |
| 2473375 | GATGACCCTTTGGTCATA | ACG |
| 2473376 | CGGGACCAAATCATGCA | ACT |
| 12136455 | GTGAGCCAAGATCACGCCA | ACT |
| 2502987 | GCCTCAGCCTCCCAAGTAG | CGT |
| 11551767 | GAGCTGCCTCAGAGCTCTT | ACG |
| 11591205 | AAATTAGCCGGGCGTGGTG | ACT |
| 12083298 | CGGCCTCCCAAAGTGCTG | CGT |
| 12138604 | TCTCCCACCTCAGCCTCC | ACG |
| 12136042 | CTACTCGGGAGGCTGAGG | ACG |
| 12138606 | CCAGGTTCAAGTGATTCTCC | ACG |
| 12136045 | GTGGGAGAATCACTTGAACC | ACG |
| 12116596 | TTGAACCTGGGAGGTGGAG | ACT |
| 12138610 | GTGGAGCTTGCAGTGAGCC | ACT |
| 12136069 | TGTCGCCCAGGCTGGAGT | ACT |
| 12116617 | CACTGTACTCCAGCCTGGG | ACG |
| 7540056 | GTGGCAGGTACCTGTAATCC | ACG |
| 12044452 | TTTGTGAAGCAGGAGTTGTCA | ACT |
| 2076344 | CAATGAAAGGCCTTTCTC | ACG |
| 11588187 | CTCTAACTTAATCTTTCCACAAAA | CGT |
| 6696932 | CCTCCAGAGTAGATGGGATT | CGT |
| 12025531 | GTGTAAGTTCCCGAAGGGCA | ACT |
| 6682888 | AACAATAGTGTGTAAGTTCC | ACG |
| 2982390 | GGAAATGGAGTCTTCCT | ACT |
| 2179394 | GTAGGGGCGAGTGATGA | CGT |
| 2473377 | TCATCACTCGCCCCTAC | ACG |
| 2179395 | GAAAGATGAGAGAGAGATGT | ACT |
| 2502978 | CGCTAAGGATCTCAACC | ACG |
| 2502979 | GCCCCTATTATGTCCCAGG | ACT |
| 6698535 | AAGAGCCATTTACATATTTATTTAT | CGT |
| 2502980 | AGCCAGGTGTGGTGGTGC | ACT |
| 10554242 | AGGTGACATGGGGAGTTACT | ACT |
| 6697805 | CCAGCTTCGGAAGTCAC | ACT |
| 6424114 | GCGAAACCCCCGTCTCT | CGT |
| 5773058 | CCTGGATAGATTTTTTTTTTTTT | ACG |
| 4649114 | TTCTCTCTTTTGTTTTGTTG | ACT |
| 6424115 | GGGTACAAACTTTATTTAAAACAA | ACT |

### Genetic Analysis of Allelotyping Results

[0388] Allelotyping results are shown for cases and controls in Table 40. The allele frequency for the A2 allele is noted in the fifth and sixth columns for breast cancer pools and control pools, respectively, where “AF” is allele frequency. SNPs with blank allele frequencies were untyped.

TABLE 40

| | Position in | | | | | | | Breast Cancer |
|---|---|---|---|---|---|---|---|---|
| | SEQ ID | Chromosome | A1/A2 | | | | | Associated |
| dbSNP rs# | NO: 5 | Position | Allele | Case AF | Control AF | p-Value | OR | Allele |
| 627451 | 215 | 23536215 | G/A | G = 0.753 | G = 0.765 | 0.681 | 1.06 | A |
| | | | | A = 0.247 | A = 0.235 | | | |
| 12082331 | 385 | 23536385 | G/C | G = 0.999 | G = 1.000 | 0.913 | 2.58 | C |
| | | | | C = 0.001 | C = 0.000 | | | |
| 2267960 | 2019 | 23538019 | T/C | T = 0.734 | T = 0.742 | 0.796 | 1.04 | C |
| | | | | C = 0.266 | C = 0.258 | | | |
| 7519640 | 3112 | 23539112 | C/G | C = 0.77 | C = 0.778 | 0.82 | 1.04 | G |
| | | | | G = 0.230 | G = 0.222 | | | |
| 12086741 | 3437 | 23539437 | G/A | G = 0.999 | G = 0.999 | 0.979 | 1.15 | A |
| | | | | A = 0.001 | A = 0.001 | | | |
| 3934189 | 4326 | 23540326 | T/C | T = 1.000 | T = 1.000 | 0.948 | 0.43 | T |
| | | | | C = 0.000 | C = 0.000 | | | |
| 12135415 | 4523 | 23540523 | A/G | A = | A = 0.997 | | | |
| | | | | G = | G = 0.003 | | | |
| 12088267 | 4645 | 23540645 | A/G | A = 0.001 | A = 0 | 0.963 | 0.00 | A |
| | | | | G = 0.999 | G = 1.000 | | | |
| 12084665 | 4646 | 23540646 | C/T | C = 0.875 | C = | | | |
| | | | | T = 0.125 | T = | | | |
| 550850 | 5830 | 23541830 | T/C | T = 0.906 | T = 0.917 | 0.624 | 1.15 | C |
| | | | | C = 0.094 | C = 0.083 | | | |
| 557227 | 6556 | 23542556 | G/T | G = 0.999 | G = 0.998 | 0.947 | 0.51 | G |
| | | | | T = 0.001 | T = 0.002 | | | |
| 12137502 | 6568 | 23542568 | T/A | T = 0.001 | T = 0.001 | 0.989 | 1.33 | A |
| | | | | A = 0.999 | A = 0.999 | | | |
| 12118858 | 6570 | 23542570 | C/T | C = 1.000 | C = 1.000 | 0.993 | 1.10 | T |
| | | | | T = 0.000 | T = 0.000 | | | |
| 2294495 | 9351 | 23545351 | C/T | C = 0.781 | C = 0.723 | 0.0342 | 0.73 | C |
| | | | | T = 0.219 | T = 0.277 | | | |
| 12401650 | 10874 | 23546874 | C/T | C = 0.999 | C = 0.999 | 0.991 | 1.08 | T |
| | | | | T = 0.001 | T = 0.001 | | | |
| 2235541 | 10926 | 23546926 | C/T | C = 0.929 | C = 0.936 | 0.712 | 1.11 | T |
| | | | | T = 0.071 | T = 0.064 | | | |
| 520713 | 11462 | 23547462 | G/A | G = 0.997 | G = 0.996 | 0.96 | 0.77 | G |
| | | | | A = 0.003 | A = 0.004 | | | |
| 550252 | 12415 | 23548415 | T/C | T = 0.002 | T = 0.001 | 0.969 | 0.75 | T |
| | | | | C = 0.998 | C = 0.999 | | | |
| HT014-AA | 12668 | 23548668 | A/G | A = 0.116 | A = 0.076 | 0.0822 | 0.62 | A |
| | | | | G = 0.884 | G = 0.924 | | | |
| 12093683 | 13886 | 23549886 | G/C | G = | G = 0.991 | | | |
| | | | | C = | C = 0.009 | | | |
| 10917421 | 15005 | 23551005 | G/A | G = 1.000 | G = 0.999 | 0.89 | 0.12 | G |
| | | | | A = 0.000 | A = 0.001 | | | |
| 2744873 | 15387 | 23551387 | A/T | A = 0.002 | A = 0.001 | 0.899 | 0.12 | A |
| | | | | T = 0.998 | T = 0.999 | | | |
| 12091764 | 15639 | 23551639 | G/A | G = | G = 0.95 | | | |
| | | | | A = | A = 0.050 | | | |
| HT014-AB | 15761 | 23551761 | A/T | A = 0.344 | A = 0.425 | 0.0165 | 1.41 | T |
| | | | | T = 0.656 | T = 0.575 | | | |
| 2076345 | 16969 | 23552969 | C/T | C = 0.672 | C = 0.616 | 0.0738 | 0.78 | C |
| | | | | T = 0.328 | T = 0.384 | | | |
| 2076346 | 17124 | 23553124 | T/C | T = 0.799 | T = 0.822 | 0.425 | 1.16 | C |
| | | | | C = 0.201 | C = 0.178 | | | |
| 2473379 | 17369 | 23553369 | A/G | A = 0.994 | A = 0.994 | 0.982 | 0.95 | A |
| | | | | G = 0.006 | G = 0.006 | | | |
| 6679300 | 17523 | 23553523 | C/G | C = 0.003 | C = 0.005 | 0.854 | 1.93 | G |
| | | | | G = 0.997 | G = 0.995 | | | |
| 11811395 | 18158 | 23554158 | T/A | T = 1.000 | T = 1.000 | 0.994 | 1.07 | A |
| | | | | A = 0.000 | A = 0.000 | | | |
| 8179467 | 18220 | 23554220 | T/A | T = 0.831 | T = 0.734 | 0.00376 | 0.56 | T |
| | | | | A = 0.169 | A = 0.266 | | | |
| 8179468 | 18224 | 23554224 | T/A | T = | T = 0.099 | | | |
| | | | | A = | A = 0.901 | | | |
| 10917423 | 18538 | 23554538 | A/G | A = 0.793 | A = 0.831 | 0.142 | 1.28 | G |
| | | | | G = 0.207 | G = 0.169 | | | |
| 7536699 | 18810 | 23554810 | G/C | G = 1.000 | G = 0.998 | 0.884 | 0.45 | G |
| | | | | C = 0.000 | C = 0.002 | | | |
| 3215497 | 20282 | 23556282 | —/T | — = 0.549 | — = 0.528 | 0.514 | 0.92 | — |
| | | | | T = 0.451 | T = 0.472 | | | |
| 1000213 | 20495 | 23556495 | C/A | C = 0 | C = 0.001 | 0.908 | | A |
| | | | | A = 1.000 | A = 0.999 | | | |
| 1000212 | 20633 | 23556633 | C/T | C = 1.000 | C = 0.999 | 0.843 | 0.14 | C |
| | | | | T = 0.000 | T = 0.001 | | | |
| 1000211 | 20659 | 23556659 | G/A | G = 0.999 | G = 0.998 | 0.896 | 0.54 | G |
| | | | | A = 0.001 | A = 0.002 | | | |
| 1045017 | 21603 | 23557603 | A/G | A = 0.368 | A = 0.342 | 0.445 | 0.90 | A |
| | | | | G = 0.632 | G = 0.658 | | | |
| 12059520 | 24075 | 23560075 | C/G | C = 0.995 | C = 0.992 | 0.81 | 0.60 | C |
| | | | | G = 0.005 | G = 0.008 | | | |
| 2143118 | 24191 | 23560191 | C/T | C = 0.999 | C = 0.999 | 0.922 | 1.73 | T |
| | | | | T = 0.001 | T = 0.001 | | | |
| 12126804 | 25010 | 23561010 | T/C | T = 0.002 | T = 0.005 | 0.7 | 3.45 | C |
| | | | | C = 0.998 | C = 0.995 | | | |
| 533276 | 25124 | 23561124 | C/T | C = 0.999 | C = 0.999 | 0.971 | 0.83 | C |
| | | | | T = 0.001 | T = 0.001 | | | |
| 12402174 | 25145 | 23561145 | G/C | G = 1.000 | G = 1.000 | 0.942 | 0.00 | G |
| | | | | C = 0 | C = 0.000 | | | |
| 2864110 | 25222 | 23561222 | C/A | C = 0.001 | C = 0.001 | 0.995 | 1.05 | A |
| | | | | A = 0.999 | A = 0.999 | | | |
| 11581873 | 25288 | 23561288 | T/C | T = 0.001 | T = 0.001 | 0.991 | 0.40 | T |
| | | | | C = 0.999 | C = 0.999 | | | |
| 12062449 | 26080 | 23562080 | G/A | G = 0.999 | G = 0.999 | 0.951 | 0.73 | G |
| | | | | A = 0.001 | A = 0.001 | | | |
| 12033190 | 26556 | 23562556 | C/T | C = 0.998 | C = 0.999 | 0.925 | 1.38 | T |
| | | | | T = 0.002 | T = 0.001 | | | |
| 10157566 | 27416 | 23563416 | T/C | T = | T = 0.006 | | | |
| | | | | C = | C = 0.994 | | | |
| 486746 | 27432 | 23563432 | C/G | C = 1.000 | C = 0.998 | 0.84 | 0.36 | C |
| | | | | G = 0.000 | G = 0.002 | | | |
| 11802707 | 29841 | 23565841 | A/G | A = 0.004 | A = 0.004 | 0.976 | 1.22 | G |
| | | | | G = 0.996 | G = 0.996 | | | |
| 6668550 | 29955 | 23565955 | C/A | C = 0.001 | C = 0.002 | 0.919 | 2.07 | A |
| | | | | A = 0.999 | A = 0.998 | | | |
| 7410946 | 30160 | 23566160 | A/G | A = 0.015 | A = 0.02 | 0.773 | 1.32 | G |
| | | | | G = 0.985 | G = 0.980 | | | |
| 7410970 | 30294 | 23566294 | G/C | G = 0.993 | G = 0.997 | 0.814 | 2.03 | C |
| | | | | C = 0.007 | C = 0.003 | | | |
| 6657558 | 31039 | 23567039 | C/G | C = 0.019 | C = 0.038 | 0.227 | 2.14 | G |
| | | | | G = 0.981 | G = 0.962 | | | |
| 2143119 | 32071 | 23568071 | T/C | T = 0.001 | T = 0.002 | 0.887 | 9.57 | C |
| | | | | C = 0.999 | C = 0.998 | | | |
| 7514394 | 33698 | 23569698 | T/C | T = 0.624 | T = 0.586 | 0.23 | 0.85 | T |
| | | | | C = 0.376 | C = 0.414 | | | |
| 11591202 | 35555 | 23571555 | A/C | A = 0.744 | A = 0.67 | 0.0142 | 0.70 | A |
| | | | | C = 0.256 | C = 0.330 | | | |
| 6673991 | 36658 | 23572658 | A/G | A = 1.000 | A = 0.999 | 0.912 | 0.04 | A |
| | | | | G = 0.000 | G = 0.001 | | | |
| HT014-AC | 37720 | 23573720 | G/C | G = 0.069 | G = 0.0630 | 0.736 | 0.90 | G |
| | | | | C = 0.931 | C = 0.937 | | | |
| 12034848 | 38304 | 23574304 | C/T | C = 0.623 | C = 0.799 | 5.36E−08 | 2.40 | T |
| | | | | T = 0.377 | T = 0.201 | | | |
| 2502984 | 39008 | 23575008 | T/C | T = 0.197 | T = 0.16 | 0.145 | 0.77 | T |
| | | | | C = 0.803 | C = 0.840 | | | |
| 3831910 | 39985 | 23575985 | A/— | A = 0.152 | A = 0.01 | 2.26E−08 | 0.05 | A |
| | | | | — = 0.848 | — = 0.990 | | | |
| 11379444 | 39989 | 23575989 | —/T | — = 0.144 | — = 0.146 | 0.957 | 1.01 | T |
| | | | | T = 0.856 | T = 0.854 | | | |
| 725119 | 40683 | 23576683 | T/A | T = 0 | T = 0.002 | 0.892 | | A |
| | | | | A = 1.000 | A = 0.998 | | | |
| 10917425 | 42158 | 23578158 | T/C | T = 0.865 | T = 0.856 | 0.691 | 0.93 | T |
| | | | | C = 0.135 | C = 0.144 | | | |
| 12077788 | 44369 | 23580369 | C/G | C = 1.000 | C = 1.000 | 0.986 | 0.79 | C |
| | | | | G = 0.000 | G = 0.000 | | | |
| 12077830 | 44503 | 23580503 | C/G | C = 0.999 | C = 1.000 | 0.95 | 1.83 | G |
| | | | | G = 0.001 | G = 0.000 | | | |
| 2473380 | 45382 | 23581382 | C/T | C = 0.708 | C = 0.709 | 0.97 | 1.01 | T |
| | | | | T = 0.292 | T = 0.291 | | | |
| 2473381 | 46171 | 23582171 | A/C | A = 1.000 | A = 1.000 | 0.943 | 0.32 | A |
| | | | | C = 0.000 | C = 0.000 | | | |
| 11545132 | 47276 | 23583276 | G/T | G = 0.999 | G = 0.999 | 0.99 | 1.06 | T |
| | | | | T = 0.001 | T = 0.001 | | | |
| 1046924 | 47299 | 23583299 | T/C | T = 1.000 | T = 1.000 | 0.976 | 0.00 | T |
| | | | | C = 0 | C = 0.000 | | | |
| 4237 | 47604 | 23583604 | A/G | A = 0.664 | A = 0.612 | 0.0897 | 0.80 | A |
| | | | | G = 0.336 | G = 0.388 | | | |
| 4375317 | 48462 | 23584462 | G/A | G = 0.808 | G = 0.8 | 0.799 | 0.95 | G |
| | | | | A = 0.192 | A = 0.200 | | | |
| 11584220 | 50786 | 23586786 | A/C | A = 0.001 | A = 0 | 0.93 | 0.00 | A |
| | | | | C = 0.999 | C = 1.000 | | | |
| 2232975 | 51057 | 23587057 | G/T | G = 1.000 | G = 1.000 | 0.929 | 0.32 | G |
| | | | | T = 0.000 | T = 0.000 | | | |
| 2502985 | 51310 | 23587310 | G/A | G = 0 | G = 0.001 | 0.958 | | A |
| | | | | A = 1.000 | A = 0.999 | | | |
| 3835423 | 51996 | 23587996 | C/— | C = 0.112 | C = 0.1 | 0.555 | 0.88 | C |
| | | | | — = 0.888 | — = 0.900 | | | |
| 2232976 | 52546 | 23588546 | T/G | T = 0.998 | T = 0.998 | 0.984 | 1.08 | G |
| | | | | G = 0.002 | G = 0.002 | | | |
| 2232977 | 52602 | 23588602 | C/T | C = 1.000 | C = 0.999 | 0.897 | 0.27 | C |
| | | | | T = 0.000 | T = 0.001 | | | |
| 2232978 | 52725 | 23588725 | G/A | G = 1.000 | G = 0.999 | 0.875 | 0.09 | G |
| | | | | A = 0.000 | A = 0.001 | | | |
| 2232979 | 52858 | 23588858 | A/C | A = 0.002 | A = 0.002 | 0.982 | 0.86 | A |
| | | | | C = 0.998 | C = 0.998 | | | |
| 2232980 | 52935 | 23588935 | T/G | T = 0.001 | T = 0.001 | 0.977 | 1.70 | G |
| | | | | G = 0.999 | G = 0.999 | | | |
| 2232981 | 52948 | 23588948 | C/T | C = 0.999 | C = 1.000 | 0.973 | 1.28 | T |
| | | | | T = 0.001 | T = 0.000 | | | |
| 2232982 | 53102 | 23589102 | T/C | T = 0.176 | T = 0.075 | 0.000007 | 0.38 | T |
| | | | | C = 0.824 | C = 0.925 | | | |
| 2232983 | 54160 | 23590160 | C/A | C = 0.999 | C = 0.999 | 0.937 | 1.48 | A |
| | | | | A = 0.001 | A = 0.001 | | | |
| 2232984 | 54794 | 23590794 | C/T | C = 0.999 | C = 0.999 | 0.977 | 0.86 | C |
| | | | | T = 0.001 | T = 0.001 | | | |
| 2232985 | 54798 | 23590798 | T/C | T = 0.001 | T = 0.005 | 0.756 | 4.62 | C |
| | | | | C = 0.999 | C = 0.995 | | | |
| 2232986 | 54853 | 23590853 | T/C | T = 0.789 | T = 0.831 | 0.152 | 1.31 | C |
| | | | | C = 0.211 | C = 0.169 | | | |
| 2745 | 55422 | 23591422 | A/G | A = 0.815 | A = 0.833 | 0.472 | 1.13 | G |
| | | | | G = 0.185 | G = 0.167 | | | |
| 2744 | 55460 | 23591460 | C/G | C = 0.964 | C = 0.95 | 0.415 | 0.70 | C |
| | | | | G = 0.036 | G = 0.050 | | | |
| 11546127 | 55645 | 23591645 | G/T | G = 0.999 | G = 0.999 | 0.996 | 1.03 | T |
| | | | | T = 0.001 | T = 0.001 | | | |
| 1049988 | 55660 | 23591660 | T/C | T = 0.003 | T = 0.005 | 0.872 | 1.45 | C |
| | | | | C = 0.997 | C = 0.995 | | | |
| 1803613 | 55729 | 23591729 | C/T | C = 1.000 | C = 1.000 | 0.983 | 1.25 | T |
| | | | | T = 0.000 | T = 0.000 | | | |
| 1803612 | 55736 | 23591736 | T/G | T = 0.026 | T = 0.039 | 0.539 | 1.51 | G |
| | | | | G = 0.974 | G = 0.961 | | | |
| HT014-AD | 55821 | 23591821 | T/C | T = 0.003 | T = 0.005 | 0.877 | 1.44 | C |
| | | | | C = 0.997 | C = 0.995 | | | |
| 3209973 | 55970 | 23591970 | T/G | T = 0.001 | T = 0.001 | 0.961 | 2.36 | G |
| | | | | G = 0.999 | G = 0.999 | | | |
| 3180545 | 56150 | 23592150 | C/A | C = 0.999 | C = 0.999 | 0.967 | 0.78 | C |
| | | | | A = 0.001 | A = 0.001 | | | |
| 3180383 | 56167 | 23592167 | A/G | A = 0.004 | A = 0.005 | 0.932 | 1.31 | G |
| | | | | G = 0.996 | G = 0.995 | | | |
| 3177814 | 56171 | 23592171 | G/T | G = 0.999 | G = 1.000 | 0.932 | 1.86 | T |
| | | | | T = 0.001 | T = 0.000 | | | |
| 3180546 | 56210 | 23592210 | G/T | G = 0.002 | G = 0.001 | 0.957 | 0.61 | G |
| | | | | T = 0.998 | T = 0.999 | | | |
| 3180547 | 56213 | 23592213 | A/C | A = 0.001 | A = 0.002 | 0.984 | 1.22 | C |
| | | | | C = 0.999 | C = 0.998 | | | |
| 11805398 | 56259 | 23592259 | T/G | T = 0.001 | T = 0.001 | 0.997 | 0.95 | T |
| | | | | G = 0.999 | G = 0.999 | | | |
| 760941 | 56461 | 23592461 | T/C | T = 0.672 | T = 0.626 | 0.148 | 0.82 | T |
| | | | | C = 0.328 | C = 0.374 | | | |
| 3177813 | 56480 | 23592480 | T/C | T = 0.002 | T = 0.001 | 0.947 | 0.50 | T |
| | | | | C = 0.998 | C = 0.999 | | | |
| 3180548 | 56486 | 23592486 | A/G | A = 0.001 | A = 0.002 | 0.899 | 8.26 | G |
| | | | | G = 0.999 | G = 0.998 | | | |
| 3179864 | 56499 | 23592499 | A/G | A = 0.002 | A = 0.001 | 0.848 | 0.16 | A |
| | | | | G = 0.998 | G = 0.999 | | | |
| 3177812 | 56510 | 23592510 | T/C | T = 0.003 | T = 0.002 | 0.925 | 0.57 | T |
| | | | | C = 0.997 | C = 0.998 | | | |
| 3179863 | 56543 | 23592543 | G/T | G = 1.000 | G = 1.000 | 0.994 | 0.64 | G |
| | | | | T = 0.000 | T = 0.000 | | | |
| 6692104 | 56827 | 23592827 | G/C | G = 1.000 | G = 1.000 | 0.985 | 0.68 | G |
| | | | | C = 0.000 | C = 0.000 | | | |
| 3180549 | 56846 | 23592846 | G/C | G = 0.001 | G = 0.001 | 0.909 | 0.13 | G |
| | | | | C = 0.999 | C = 0.999 | | | |
| 3179862 | 56859 | 23592859 | C/A | C = 0.999 | C = 0.997 | 0.806 | 0.37 | C |
| | | | | A = 0.001 | A = 0.003 | | | |
| 3177811 | 56870 | 23592870 | G/C | G = 0.002 | G = 0.002 | 0.996 | 0.95 | G |
| | | | | C = 0.998 | C = 0.998 | | | |
| 3177810 | 56890 | 23592890 | C/A | C = 1.000 | C = 1.000 | 1 | | |
| | | | | A = 0 | A = 0 | | | |
| 3180382 | 56907 | 23592907 | A/C | A = 0.002 | A = 0.001 | 0.877 | 0.25 | A |
| | | | | C = 0.998 | C = 0.999 | | | |
| 11546126 | 57767 | 23593767 | C/T | C = 0.001 | C = 0.002 | 0.903 | 2.73 | T |
| | | | | T = 0.999 | T = 0.998 | | | |
| 7551384 | 58774 | 23594774 | C/G | C = 0.002 | C = 0.001 | 0.978 | 0.80 | C |
| | | | | G = 0.998 | G = 0.999 | | | |
| 12141511 | 59444 | 23595444 | T/C | T = 0.001 | T = 0 | 0.991 | 0.00 | T |
| | | | | C = 0.999 | C = 1.000 | | | |
| 2473382 | 59452 | 23595452 | G/A | G = 0.999 | G = 0.999 | 0.917 | 0.55 | G |
| | | | | A = 0.001 | A = 0.001 | | | |
| 12038166 | 59753 | 23595753 | A/G | A = 0.001 | A = 0.002 | 0.907 | 6.61 | G |
| | | | | G = 0.999 | G = 0.998 | | | |
| 6666908 | 60766 | 23596766 | C/A | C = 1.000 | C = 0.999 | 0.908 | 0.50 | C |
| | | | | A = 0.000 | A = 0.001 | | | |
| 12041159 | 61135 | 23597135 | G/C | G = 0.37 | G = 0.264 | 0.000762 | 0.61 | G |
| | | | | C = 0.630 | C = 0.736 | | | |
| 12031592 | 61339 | 23597339 | A/C | A = 0.483 | A = 0.543 | 0.15 | 1.27 | C |
| | | | | C = 0.517 | C = 0.457 | | | |
| 1062598 | 61922 | 23597922 | C/T | C = 0.999 | C = 1.000 | 0.874 | 2.87 | T |
| | | | | T = 0.001 | T = 0.000 | | | |
| 11714 | 61942 | 23597942 | C/T | C = 0.152 | C = 0.143 | 0.721 | 0.93 | C |
| | | | | T = 0.848 | T = 0.857 | | | |
| 3203593 | 61958 | 23597958 | A/G | A = 0.002 | A = 0.001 | 0.912 | 0.30 | A |
| | | | | G = 0.998 | G = 0.999 | | | |
| 1042436 | 62068 | 23598068 | T/C | T = 0.001 | T = 0.002 | 0.981 | 1.21 | C |
| | | | | C = 0.999 | C = 0.998 | | | |
| 2076343 | 62601 | 23598601 | A/G | A = 0.809 | A = 0.737 | 0.00747 | 0.66 | A |
| | | | | G = 0.191 | G = 0.263 | | | |
| 12131539 | 62661 | 23598661 | G/A | G = 1.000 | G = 1.000 | 0.919 | 0.06 | G |
| | | | | A = 0.000 | A = 0.000 | | | |
| 11583935 | 62882 | 23598882 | T/G | T = 0 | T = 0.001 | 0.934 | | G |
| | | | | G = 1.000 | G = 0.999 | | | |
| 12140263 | 63949 | 23599949 | A/C | A = 1.000 | A = | | | |
| | | | | C = 0 | C = | | | |
| 3835225 | 64732 | 23600732 | —/AG | — = 1.000 | — = 1.000 | 0.997 | 0.92 | — |
| | | | | AG = 0.000 | AG = 0.000 | | | |
| 2473374 | 65145 | 23601145 | C/T | C = 0.001 | C = 0.002 | 0.953 | 1.72 | T |
| | | | | T = 0.999 | T = 0.998 | | | |
| 2256179 | 65780 | 23601780 | A/G | A = 0.658 | A = 0.602 | 0.0693 | 0.79 | A |
| | | | | G = 0.342 | G = 0.398 | | | |
| 974698 | 66260 | 23602260 | C/T | C = 0.437 | C = 0.499 | 0.0501 | 1.28 | T |
| | | | | T = 0.563 | T = 0.501 | | | |
| 1018396 | 67087 | 23603087 | C/T | C = 0.447 | C = 0.522 | 0.0188 | 1.35 | T |
| | | | | T = 0.553 | T = 0.478 | | | |
| 719399 | 67937 | 23603937 | G/A | G = 0.206 | G = 0.206 | 0.99 | 1.00 | A |
| | | | | A = 0.794 | A = 0.794 | | | |
| 719400 | 68196 | 23604196 | G/A | G = 0.901 | G = 0.931 | 0.112 | 1.49 | A |
| | | | | A = 0.099 | A = 0.069 | | | |
| 2502986 | 68767 | 23604767 | G/T | G = 0.453 | G = 0.518 | 0.0505 | 1.29 | T |
| | | | | T = 0.547 | T = 0.482 | | | |
| 6679378 | 69482 | 23605482 | T/C | T = 0.741 | T = 0.696 | 0.132 | 0.80 | T |
| | | | | C = 0.259 | C = 0.304 | | | |
| 2473375 | 70020 | 23606020 | C/T | C = 0.469 | C = 0.522 | 0.117 | 1.24 | T |
| | | | | T = 0.531 | T = 0.478 | | | |
| 2473376 | 72759 | 23608759 | A/G | A = 0.002 | A = 0.002 | 0.991 | 0.95 | A |
| | | | | G = 0.998 | G = 0.998 | | | |
| 12136455 | 72911 | 2360891 1 | G/C | G = 0.999 | G = 0.997 | 0.882 | 0.59 | G |
| | | | | C = 0.001 | C = 0.003 | | | |
| 2502987 | 73331 | 23609331 | C/A | C = 0.946 | C = 0.944 | 0.934 | 0.96 | C |
| | | | | A = 0.054 | A = 0.056 | | | |
| 11551767 | 74250 | 23610250 | C/T | C = 1.000 | C = 0.999 | 0.922 | 0.46 | C |
| | | | | T = 0.000 | T = 0.001 | | | |
| 11591205 | 74486 | 23610486 | T/C | T = 0.133 | T = 0.139 | 0.817 | 1.05 | C |
| | | | | C = 0.867 | C = 0.861 | | | |
| 12083298 | 74921 | 23610921 | A/T | A = 0.001 | A = 0.001 | 0.99 | 0.52 | A |
| | | | | T = 0.999 | T = 0.999 | | | |
| 12138604 | 75065 | 23611065 | G/A | G = 0.682 | G = 0.688 | 0.825 | 1.03 | A |
| | | | | A = 0.318 | A = 0.312 | | | |
| 12136042 | 75077 | 23611077 | C/T | C = 0.981 | C = 0.978 | 0.873 | 0.88 | C |
| | | | | T = 0.019 | T = 0.022 | | | |
| 12138606 | 75078 | 23611078 | G/A | G = 0.002 | G = 0.003 | 0.969 | 1.38 | A |
| | | | | A = 0.998 | A = 0.997 | | | |
| 12136045 | 75096 | 23611096 | C/T | C = 0.705 | C = 0.698 | 0.795 | 0.96 | C |
| | | | | T = 0.295 | T = 0.302 | | | |
| 12116596 | 75108 | 23611108 | C/G | C = 0.002 | C = 0.001 | 0.994 | 0.94 | C |
| | | | | G = 0.998 | G = 0.999 | | | |
| 12138610 | 75121 | 23611121 | A/G | A = 0.586 | A = 0.578 | 0.787 | 0.97 | A |
| | | | | G = 0.414 | G = 0.422 | | | |
| 12136069 | 75136 | 23611136 | T/C | T = 0.286 | T = 0.294 | 0.789 | 1.04 | C |
| | | | | C = 0.714 | C = 0.706 | | | |
| 12116617 | 75150 | 23611150 | C/T | C = | C = 0.697 | | | |
| | | | | T = | T = 0.303 | | | |
| 7540056 | 75594 | 23611594 | G/A | G = | G = 0.996 | | | |
| | | | | A = | A = 0.004 | | | |
| 12044452 | 77120 | 23613120 | T/G | T = 0.001 | T = 0.055 | 0.00645 | 57.90 | G |
| | | | | G = 0.999 | G = 0.945 | | | |
| 2076344 | 77407 | 23613407 | G/A | G = 0.893 | G = 0.901 | 0.707 | 1.09 | A |
| | | | | A = 0.107 | A = 0.099 | | | |
| 11588187 | 78522 | 23614522 | T/A | T = 0.509 | T = 0.57 | 0.0684 | 1.28 | A |
| | | | | A = 0.491 | A = 0.430 | | | |
| 6696932 | 78656 | 23614656 | T/A | T = 0 | T = 0 | 1 | | T |
| | | | | A = 1.000 | A = 1.000 | | | |
| 12025531 | 78902 | 23614902 | T/C | T = 0.004 | T = 0.003 | 0.905 | 0.67 | T |
| | | | | C = 0.996 | C = 0.997 | | | |
| 6682888 | 78911 | 23614911 | G/A | G = 1.000 | G = 1.000 | 0.935 | 0.19 | G |
| | | | | A = 0.000 | A = 0.000 | | | |
| 2982390 | 81305 | 23617305 | G/C | G = 0.487 | G = 0.57 | 0.0151 | 1.40 | C |
| | | | | C = 0.513 | C = 0.430 | | | |
| 2179394 | 81717 | 23617717 | A/T | A = 0.999 | A = 0.997 | 0.859 | 0.57 | A |
| | | | | T = 0.001 | T = 0.003 | | | |
| 2473377 | 81735 | 23617735 | C/T | C = 0.58 | C = 0.546 | 0.279 | 0.87 | C |
| | | | | T = 0.420 | T = 0.454 | | | |
| 2179395 | 81840 | 23617840 | T/C | T = 0.564 | T = 0.63 | 0.0527 | 1.32 | C |
| | | | | C = 0.436 | C = 0.370 | | | |
| 2502978 | 82511 | 23618511 | C/T | C = 1.000 | C = 1.000 | 0.98 | 0.47 | C |
| | | | | T = 0.000 | T = 0.000 | | | |
| 2502979 | 82790 | 23618790 | A/C | A = 0.686 | A = 0.629 | 0.0805 | 0.78 | A |
| | | | | C = 0.314 | C = 0.371 | | | |
| 6698535 | 83323 | 23619323 | T/A | T = 1.000 | T = 1.000 | 1 | | |
| | | | | A = 0 | A = 0 | | | |
| 2502980 | 83464 | 23619464 | T/C | T = 0.948 | T = 1000 | 0.0305 | | C |
| | | | | C = 0.052 | C = 0 | | | |
| 6697805 | 85471 | 23621471 | A/C | A = 0.687 | A = 0.774 | 0.00312 | 1.56 | C |
| | | | | C = 0.313 | C = 0.226 | | | |
| 6424114 | 85688 | 23621688 | C/A | C = 0.002 | C = 0.002 | 0.943 | 0.69 | C |
| | | | | A = 0.998 | A = 0.998 | | | |
| 5773058 | 86196 | 23622196 | —/TT | — = 0.547 | — = 0.491 | 0.0906 | 0.80 | — |
| | | | | TT = 0.453 | TT = 0.509 | | | |
| 4649114 | 86323 | 23622323 | T/G | T = 0.003 | T = 0.004 | 0.977 | 1.08 | G |
| | | | | G = 0.997 | G = 0.996 | | | |
| 6424115 | 86706 | 23622706 | A/G | A = 0.632 | A = 0.591 | 0.213 | 0.84 | A |
| | | | | G = 0.368 | G = 0.409 | | | |
| 10554242 | 83916- | 23619916\hat{ } | CACT/— | CACT = 0.476 | CACT = 0.541 | 0.0458 | 1.30 | — |
| | 83920 | 23619919 | | — = 0.524 | — = 0.459 | | | |

[0389] FIG. 1E shows proximal SNPs in and around the HT014/LOC148902/LYPLA2/GALE region for females. The position of each SNP on the chromosome is presented on the x-axis. The y-axis gives the negative logarithm (base 10) of the p-value comparing the estimated allele in the case group to that of the control group. The minor allele frequency of the control group for each SNP designated by an X or other symbol on the graphs in FIG. 1E can be determined by consulting Table 40. By proceeding down the Table from top to bottom and across the graphs from left to right the allele frequency associated with each symbol shown can be determined.

[0390] To aid the interpretation, multiple lines have been added to the graph. The broken horizontal lines are drawn at two common significance levels, 0.05 and 0.01. The vertical broken lines are drawn every 20 kb to assist in the interpretation of distances between SNPs. Two other lines are drawn to expose linear trends in the association of SNPs to the disease. The light gray line (or generally bottom-most curve) is a nonlinear smoother through the data points on the graph using a local polynomial regression method (W. S. Cleveland, E. Grosse and W. M. Shyu (1992) Local regression models. Chapter 8 of Statistical Models in S eds J. M. Chambers and T. J. Hastie, Wadsworth & Brooks/Cole.). The black line provides a local test for excess statistical significance to identify regions of association. This was created by use of a 10 kb sliding window with 1 kb step sizes. Within each window, a chi-square goodness of fit test was applied to compare the proportion of SNPs that were significant at a test wise level of 0.01, to the proportion that would be expected by chance alone (0.05 for the methods used here). Resulting p-values that were less than 10⁻⁸ were truncated at that value.

[0391] Finally, the gene or genes present in the loci region of the proximal SNPs as annotated by Locus Link (http address: www.ncbi.nlm.nih.gov/LocusLink/) are provided on the graph. The exons and introns of the genes in the covered region are plotted below each graph at the appropriate chromosomal positions. The gene boundary is indicated by the broken horizontal line. The exon positions are shown as thick, unbroken bars. An arrow is place at the 3′ end of each gene to show the direction of transcription.

### Example 16

### DPF3 Proximal SNPs

[0392] It has been discovered that a polymorphic variation (rs1990440) in the DPF3 gene is associated with the occurrence of breast cancer (see Examples 1 and 2). Subsequently, SNPs proximal to the incident SNP (rs1990440) were identified and allelotyped in breast cancer sample sets and control sample sets as described in Examples 1 and 2. Approximately 627 allelic variants located within the DPF3 gene were identified and allelotyped. The polymorphic variants are set forth in Table 41. The chromosome position provided in column four of Table 41 is based on Genome “Build 34” of NCBI's GenBank.

TABLE 41

| | Position in | | Chromosome | | Genome | Deduced |
|---|---|---|---|---|---|---|
| dbSNP rs# | SEQ ID NO: 6 | Chromosome | Position | Allele Variants | Letter | Iupac |
| 11846274 | 207 | 14 | 71066357 | g/a | a | R |
| 2526935 | 486 | 14 | 71066636 | t/g | a | M |
| 929328 | 1745 | 14 | 71067895 | t/c | a | R |
| 3742840 | 1922 | 14 | 71068072 | a/g | t | Y |
| 9671739 | 2190 | 14 | 71068340 | a/c | c | M |
| 8006208 | 2590 | 14 | 71068740 | c/t | c | Y |
| 8006230 | 2637 | 14 | 71068787 | t/c | c | Y |
| 8007836 | 2804 | 14 | 71068954 | c/t | t | Y |
| 8006889 | 2806 | 14 | 71068956 | g/a | g | R |
| 8010823 | 2895 | 14 | 71069045 | c/t | c | Y |
| 8011029 | 3109 | 14 | 71069259 | a/t | a | W |
| 10649920 | 3185 | 14 | 71069335 | —/aa | a | N |
| 2803956 | 3355 | 14 | 71069505 | a/g | a | R |
| 2803957 | 3642 | 14 | 71069792 | c/t | t | Y |
| 2526934 | 3805 | 14 | 71069955 | t/c | a | R |
| 9671558 | 4236 | 14 | 71070386 | a/g | g | R |
| 2526933 | 4331 | 14 | 71070481 | c/g | c | S |
| 2803959 | 4509 | 14 | 71070659 | t/c | t | Y |
| 2526932 | 4959 | 14 | 71071109 | c/t | a | R |
| 2803960 | 5009 | 14 | 71071159 | g/a | a | R |
| 12434675 | 5676 | 14 | 71071826 | g/a | g | R |
| 4899435 | 6507 | 14 | 71072657 | g/c | c | S |
| 2526931 | 6695 | 14 | 71072845 | c/t | a | R |
| 2803961 | 6717 | 14 | 71072867 | t/c | t | Y |
| 2803962 | 7131 | 14 | 71073281 | c/t | c | Y |
| 12590634 | 7873 | 14 | 71074023 | c/t | c | Y |
| 11327712 | 7922 | 14 | 71074072 | —/c | c | N |
| 2803963 | 8652 | 14 | 71074802 | a/g | g | R |
| 11844834 | 9817 | 14 | 71075967 | g/a | g | R |
| 11320415 | 10272 | 14 | 71076422 | —/a | a | N |
| 8012752 | 10823 | 14 | 71076973 | t/c | c | Y |
| 11623878 | 11465 | 14 | 71077615 | t/c | c | Y |
| 11623926 | 11639 | 14 | 71077789 | c/t | c | Y |
| 12434442 | 12177 | 14 | 71078327 | t/c | c | Y |
| 2526930 | 12604 | 14 | 71078754 | g/a | c | Y |
| 12435306 | 13363 | 14 | 71079513 | g/a | a | R |
| 10144028 | 13454 | 14 | 71079604 | c/g | c | S |
| 4899436 | 13540 | 14 | 71079690 | c/t | c | Y |
| 7140593 | 13923 | 14 | 71080073 | a/c | a | M |
| 2107687 | 14507 | 14 | 71080657 | t/c | a | R |
| 991882 | 16550 | 14 | 71082700 | c/a | t | K |
| 3327 | 17641 | 14 | 71083791 | c/t | t | Y |
| 2526928 | 18903 | 14 | 71085053 | t/c | a | R |
| 7401336 | 19395 | 14 | 71085545 | a/g | a | R |
| 2526926 | 19527 | 14 | 71085677 | t/a | a | W |
| 994760 | 20369 | 14 | 71086519 | t/c | a | R |
| 994759 | 20505 | 14 | 71086655 | g/t | a | M |
| 994758 | 20562 | 14 | 71086712 | c/t | g | R |
| 11848404 | 20907 | 14 | 71087057 | a/t | t | W |
| 2526925 | 20949 | 14 | 71087099 | c/t | a | R |
| 11844236 | 21278 | 14 | 71087428 | t/g | g | K |
| 2526924 | 21314 | 14 | 71087464 | c/t | a | R |
| 2803965 | 21905 | 14 | 71088055 | c/g | c | S |
| 2526923 | 22252 | 14 | 71088402 | g/c | g | S |
| 7152467 | 22941 | 14 | 71089091 | c/t | c | Y |
| 11623462 | 23542 | 14 | 71089692 | c/g | g | S |
| 2803966 | 24677 | 14 | 71090827 | c/t | c | Y |
| 2526922 | 25009 | 14 | 71091159 | t/c | a | R |
| 2526920 | 25618 | 14 | 71091768 | c/t | a | R |
| 11848135 | 26082 | 14 | 71092232 | t/c | t | Y |
| 11629210 | 26136 | 14 | 71092286 | c/a | c | M |
| 2803967 | 26491 | 14 | 71092641 | c/t | t | Y |
| 16455 | 28873 | 14 | 71095023 | —/gcc | g | N |
| 757655 | 28886 | 14 | 71095036 | g/a | c | Y |
| 5809581 | 29105 | 14 | 71095255 | —/tctgtaat | t | N |
| 3057139 | 29106 | 14 | 71095256 | —/ctgtaatt | c | N |
| 2247658 | 29572 | 14 | 71095722 | c/t | t | Y |
| 11625609 | 30640 | 14 | 71096790 | c/t | c | Y |
| 8005580 | 30801 | 14 | 71096951 | a/g | a | R |
| 8010472 | 30962 | 14 | 71097112 | g/a | g | R |
| 2526919 | 31662 | 14 | 71097812 | t/c | a | R |
| 2803968 | 34374 | 14 | 71100524 | g/a | a | R |
| 11623943 | 34494 | 14 | 71100644 | t/c | c | Y |
| 11623946 | 34501 | 14 | 71100651 | g/c | c | S |
| 1557926 | 34544 | 14 | 71100694 | c/g | c | S |
| 12434611 | 35493 | 14 | 71101643 | a/g | g | R |
| 2526918 | 35594 | 14 | 71101744 | t/g | a | M |
| 5809582 | 35901 | 14 | 71102051 | —/t | t | N |
| 8008279 | 35940 | 14 | 71102090 | c/g | c | S |
| 2803969 | 36064 | 14 | 71102214 | t/c | t | Y |
| 2526917 | 36105 | 14 | 71102255 | t/g | a | M |
| 8008774 | 36160 | 14 | 71102310 | t/c | c | Y |
| 2803970 | 36161 | 14 | 71102311 | t/g | t | K |
| 8010255 | 36308 | 14 | 71102458 | t/c | t | Y |
| 2997642 | 36335 | 14 | 71102485 | a/g | a | R |
| 2803971 | 36365 | 14 | 71102515 | g/a | a | R |
| 11313760 | 36488 | 14 | 71102638 | —/g | g | N |
| 2803972 | 36576 | 14 | 71102726 | g/t | t | K |
| 4903038 | 36641 | 14 | 71102791 | a/g | g | R |
| 2526916 | 36933 | 14 | 71103083 | a/t | t | W |
| 4903040 | 36955 | 14 | 71103105 | c/t | c | Y |
| 2803974 | 36967 | 14 | 71103117 | t/a | t | W |
| 2803975 | 37243 | 14 | 71103393 | c/t | t | Y |
| 2803976 | 38329 | 14 | 71104479 | c/t | t | Y |
| 2803977 | 38367 | 14 | 71104517 | t/g | g | K |
| 10139909 | 38476 | 14 | 71104626 | c/t | t | Y |
| 722945 | 38510 | 14 | 71104660 | g/a | c | Y |
| 917069 | 39396 | 14 | 71105546 | a/g | t | Y |
| 2803978 | 39703 | 14 | 71105853 | c/a | a | M |
| 2332890 | 39801 | 14 | 71105951 | a/g | g | R |
| 1989638 | 40078 | 14 | 71106228 | t/c | g | R |
| 10679174 | 40260 | 14 | 71106410 | ggg/— | g | N |
| 2526915 | 40513 | 14 | 71106663 | c/t | a | R |
| 2526914 | 40889 | 14 | 71107039 | t/c | g | R |
| 11158964 | 41091 | 14 | 71107241 | g/a | g | R |
| 11158965 | 41872 | 14 | 71108022 | a/g | a | R |
| 740081 | 42112 | 14 | 71108262 | a/g | c | Y |
| 740080 | 42292 | 14 | 71108442 | t/g | a | M |
| 10140582 | 42373 | 14 | 71108523 | t/c | c | Y |
| 2526913 | 44877 | 14 | 71111027 | a/g | c | Y |
| 4899437 | 45124 | 14 | 71111274 | c/g | c | S |
| 10145678 | 45831 | 14 | 71111981 | t/c | t | Y |
| 2107686 | 46030 | 14 | 71112180 | t/c | g | R |
| 2107685 | 46270 | 14 | 71112420 | t/c | a | R |
| 2107684 | 46309 | 14 | 71112459 | g/a | c | Y |
| 7154188 | 46545 | 14 | 71112695 | c/g | g | S |
| 4903041 | 47162 | 14 | 71113312 | c/t | c | Y |
| 7159637 | 47267 | 14 | 71113417 | t/c | c | Y |
| 6574089 | 49077 | 14 | 71115227 | a/g | a | R |
| 12589753 | 49377 | 14 | 71115527 | a/g | g | R |
| 4899438 | 50126 | 14 | 71116276 | g/c | c | S |
| 4903042 | 50385 | 14 | 71116535 | g/t | g | K |
| 4903043 | 50403 | 14 | 71116553 | a/t | t | W |
| 2803980 | 50422 | 14 | 71116572 | g/a | a | R |
| 10483848 | 50893 | 14 | 71117043 | t/a | a | W |
| 2240344 | 52031 | 14 | 71118181 | g/c | c | S |
| 2286068 | 52245 | 14 | 71118395 | a/g | t | Y |
| 11339669 | 52594 | 14 | 71118744 | —/g | g | N |
| 3854 | 52874 | 14 | 71119024 | a/g | t | Y |
| 11463 | 53011 | 14 | 71119161 | t/g | c | M |
| 1383 | 53656 | 14 | 71119806 | a/t | t | W |
| 1381 | 53662 | 14 | 71119812 | c/g | c | S |
| 1377 | 53711 | 14 | 71119861 | t/c | a | R |
| 11158966 | 53798 | 14 | 71119948 | a/g | g | R |
| 11158967 | 53840 | 14 | 71119990 | a/g | g | R |
| 11158968 | 53873 | 14 | 71120023 | c/t | c | Y |
| 11158969 | 53884 | 14 | 71120034 | a/g | g | R |
| 11158970 | 53937 | 14 | 71120087 | a/g | g | R |
| 11158971 | 54032 | 14 | 71120182 | g/a | g | R |
| 11849782 | 54352 | 14 | 71120502 | c/g | g | S |
| 10137616 | 55430 | 14 | 71121580 | c/t | t | Y |
| 757572 | 55920 | 14 | 71122070 | g/a | c | Y |
| 10140566 | 56081 | 14 | 71122231 | g/t | t | K |
| 2023480 | 56227 | 14 | 71122377 | a/t | t | W |
| 2526911 | 57350 | 14 | 71123500 | t/a | t | W |
| 4903044 | 57493 | 14 | 71123643 | c/t | c | Y |
| 11845162 | 57682 | 14 | 71123832 | g/c | g | S |
| 12147210 | 58092 | 14 | 71124242 | c/t | c | Y |
| 2997643 | 58731 | 14 | 71124881 | g/t | g | K |
| 2997644 | 58826 | 14 | 71124976 | a/t | a | W |
| 3814867 | 60916 | 14 | 71127066 | t/c | a | R |
| 2286067 | 62047 | 14 | 71128197 | a/g | t | Y |
| 1060570 | 62080 | 14 | 71128230 | t/g | c | M |
| 2332891 | 62665 | 14 | 71128815 | c/g | c | S |
| 2021736 | 62809 | 14 | 71128959 | g/a | t | Y |
| 7160830 | 63629 | 14 | 71129779 | t/c | c | Y |
| 2526909 | 65432 | 14 | 71131582 | a/g | t | Y |
| 7140963 | 65590 | 14 | 71131740 | g/c | g | S |
| 10143667 | 65876 | 14 | 71132026 | a/g | g | R |
| 2803981 | 67118 | 14 | 71133268 | t/c | c | Y |
| 768840 | 67348 | 14 | 71133498 | t/c | g | R |
| 5809587 | 68230 | 14 | 71134380 | t/— | t | N |
| 2023479 | 68262 | 14 | 71134412 | a/g | c | Y |
| 4903045 | 68912 | 14 | 71135062 | t/c | c | Y |
| 4903046 | 69799 | 14 | 71135949 | a/g | g | R |
| 5809588 | 70027 | 14 | 71136177 | —/g | g | N |
| 10220555 | 73335 | 14 | 71139485 | g/a | 9 | R |
| 2906132 | 74093 | 14 | 71140243 | g/a | c | Y |
| 11848482 | 74114 | 14 | 71140264 | t/g | t | K |
| 10129954 | 74592 | 14 | 71140742 | t/c | c | Y |
| 2526921 | 75061 | 14 | 71141211 | c/t | a | R |
| 4903047 | 75683 | 14 | 71141833 | g/t | g | K |
| 11846357 | 75857 | 14 | 71142007 | a/g | a | R |
| 10136385 | 76457 | 14 | 71142607 | g/c | c | S |
| 12588242 | 77130 | 14 | 71143280 | t/a | a | W |
| 11621517 | 77947 | 14 | 71144097 | c/t | t | Y |
| 2526910 | 78338 | 14 | 71144488 | c/t | g | R |
| 2526941 | 79626 | 14 | 71145776 | a/g | t | Y |
| 2803944 | 80497 | 14 | 71146647 | g/a | g | R |
| 12436770 | 80578 | 14 | 71146728 | a/g | g | R |
| 10220279 | 81171 | 14 | 71147321 | c/a | c | M |
| 10220280 | 81243 | 14 | 71147393 | g/c | c | S |
| 11844112 | 81321 | 14 | 71147471 | a/c | c | M |
| 12432455 | 82634 | 14 | 71148784 | g/c | g | S |
| 8015338 | 83269 | 14 | 71149419 | g/a | g | R |
| 3832969 | 83514 | 14 | 71149664 | cagc/— | a | N |
| 9671972 | 85367 | 14 | 71151517 | a/g | a | R |
| 9671975 | 85423 | 14 | 71151573 | c/t | c | Y |
| 7159986 | 86006 | 14 | 71152156 | t/c | c | Y |
| 11848220 | 86515 | 14 | 71152665 | t/g | t | K |
| 5016369 | 86936 | 14 | 71153086 | g/c | c | S |
| 1986423 | 87201 | 14 | 71153351 | a/g | a | R |
| 2332909 | 87205 | 14 | 71153355 | c/t | c | Y |
| 8013337 | 88313 | 14 | 71154463 | g/a | a | R |
| 11445680 | 89477 | 14 | 71155627 | —/g | a | N |
| 4903048 | 90243 | 14 | 71156393 | t/c | c | Y |
| 12434793 | 90735 | 14 | 71156885 | t/c | c | Y |
| 2332910 | 91990 | 14 | 71158140 | g/c | g | S |
| 4410017 | 92879 | 14 | 71159029 | a/g | g | R |
| 4577019 | 92880 | 14 | 71159030 | a/g | a | R |
| 2332911 | 93386 | 14 | 71159536 | a/g | g | R |
| 4996747 | 93397 | 14 | 71159547 | t/g | t | K |
| 10140820 | 93680 | 14 | 71159830 | g/t | t | K |
| 12431623 | 95585 | 14 | 71161735 | t/c | t | Y |
| 6574090 | 95818 | 14 | 71161968 | g/t | t | K |
| 8008750 | 96203 | 14 | 71162353 | c/g | g | S |
| 11627420 | 96911 | 14 | 71163061 | g/a | g | R |
| 10150185 | 98014 | 14 | 71164164 | a/g | g | R |
| 10150218 | 98229 | 14 | 71164379 | a/c | c | M |
| 9646164 | 98235 | 14 | 71164385 | t/g | g | K |
| 6574091 | 99173 | 14 | 71165323 | c/t | t | Y |
| 2332912 | 100505 | 14 | 71166655 | a/g | g | R |
| 7155359 | 101613 | 14 | 71167763 | a/g | a | R |
| 2332913 | 101660 | 14 | 71167810 | c/t | c | Y |
| 4544184 | 101681 | 14 | 71167831 | g/t | t | K |
| 4337224 | 102165 | 14 | 71168315 | g/a | g | R |
| 2332914 | 103763 | 14 | 71169913 | c/t | t | Y |
| 4280167 | 104990 | 14 | 71171140 | g/a | g | R |
| 4903049 | 105319 | 14 | 71171469 | g/t | t | K |
| 3742837 | 105447 | 14 | 71171597 | t/g | c | M |
| 10139937 | 105471 | 14 | 71171621 | a/g | a | R |
| 12434292 | 105515 | 14 | 71171665 | a/g | a | R |
| 11620671 | 105598 | 14 | 71171748 | a/t | t | W |
| 10140184 | 105674 | 14 | 71171824 | c/a | c | M |
| 2332915 | 106432 | 14 | 71172582 | c/g | g | S |
| 2332916 | 106988 | 14 | 71173138 | c/t | c | Y |
| 8012759 | 107076 | 14 | 71173226 | c/t | c | Y |
| 10149272 | 107991 | 14 | 71174141 | g/c | c | S |
| 11158973 | 108221 | 14 | 71174371 | a/g | a | R |
| 4903050 | 108410 | 14 | 71174560 | g/t | t | K |
| 10666445 | 108762 | 14 | 71174912 | ctta/— | c | N |
| 2536143 | 108924 | 14 | 71175074 | a/t | a | W |
| 10638231 | 109378 | 14 | 71175528 | ttttttttttttt/— | t | N |
| 12431636 | 109442 | 14 | 71175592 | a/g | g | R |
| 8005904 | 109619 | 14 | 71175769 | c/t | t | Y |
| 11621058 | 109820 | 14 | 71175970 | c/t | c | Y |
| 10133224 | 110530 | 14 | 71176680 | t/c | c | Y |
| 12433185 | 110956 | 14 | 71177106 | a/t | a | W |
| 740974 | 111965 | 14 | 71178115 | a/g | a | R |
| 740973 | 111995 | 14 | 71178145 | g/c | c | S |
| 740972 | 112040 | 14 | 71178190 | t/c | c | Y |
| 740971 | 112058 | 14 | 71178208 | a/g | a | R |
| 4243642 | 112592 | 14 | 71178742 | c/g | g | S |
| 4415952 | 113044 | 14 | 71179194 | c/t | t | Y |
| 2215589 | 113263 | 14 | 71179413 | g/a | t | Y |
| 434321 1 | 113301 | 14 | 71179451 | t/c | c | Y |
| 2536142 | 113513 | 14 | 71179663 | t/c | g | R |
| 11293340 | 113639 | 14 | 71179789 | —/a | a | N |
| 10151620 | 114092 | 14 | 71180242 | c/g | c | S |
| 2286840 | 114432 | 14 | 71180582 | t/g | a | M |
| 8023089 | 114643 | 14 | 71180793 | t/a | a | W |
| 8008009 | 114980 | 14 | 71181130 | g/a | g | R |
| 11419089 | 115312 | 14 | 71181462 | —/t | t | N |
| 10694676 | 115315 | 14 | 71181465 | —/tt | t | N |
| 2536141 | 115377 | 14 | 71181527 | c/t | g | R |
| 765247 | 115625 | 14 | 71181775 | c/a | t | K |
| 7147626 | 115740 | 14 | 71181890 | t/c | t | Y |
| 10132629 | 115747 | 14 | 71181897 | g/a | g | R |
| 4903051 | 115890 | 14 | 71182040 | c/g | g | S |
| 11158974 | 117279 | 14 | 71183429 | t/c | c | Y |
| 1035021 | 117522 | 14 | 71183672 | c/a | t | K |
| 6574093 | 118721 | 14 | 71184871 | t/g | g | K |
| 4899439 | 119926 | 14 | 71186076 | t/c | c | Y |
| 7155287 | 119974 | 14 | 71186124 | t/a | t | W |
| 7154402 | 120281 | 14 | 71186431 | a/g | a | R |
| 7154781 | 120484 | 14 | 71186634 | g/a | a | R |
| 6574094 | 122397 | 14 | 71188547 | c/t | t | Y |
| 10132242 | 122783 | 14 | 71188933 | g/a | a | R |
| 10146959 | 123029 | 14 | 71189179 | t/c | t | Y |
| 10147466 | 123535 | 14 | 71189685 | t/c | t | Y |
| 11626411 | 124107 | 14 | 71190257 | g/c | g | S |
| 4899440 | 124427 | 14 | 71190577 | c/t | c | Y |
| 10144553 | 124738 | 14 | 71190888 | t/c | c | Y |
| 11627663 | 125329 | 14 | 71191479 | a/c | c | M |
| 11627799 | 125796 | 14 | 71191946 | a/g | a | R |
| 11851733 | 126265 | 14 | 71192415 | g/a | g | R |
| 10140317 | 126768 | 14 | 71192918 | a/t | t | W |
| 8007375 | 127306 | 14 | 71193456 | c/t | t | Y |
| 4899441 | 127544 | 14 | 71193694 | g/a | a | R |
| 11158975 | 127809 | 14 | 71193959 | a/c | c | M |
| 11419607 | 127817 | 14 | 71193967 | a/— | a | N |
| 2109793 | 129771 | 14 | 71195921 | c/g | g | S |
| 8023156 | 130061 | 14 | 71196211 | g/c | g | S |
| 10140579 | 130333 | 14 | 71196483 | g/a | a | R |
| 7148199 | 131734 | 14 | 71197884 | t/c | t | Y |
| 7146916 | 131787 | 14 | 71197937 | g/a | a | R |
| 1990439 | 132633 | 14 | 71198783 | g/a | c | Y |
| 6574095 | 135279 | 14 | 71201429 | c/g | c | S |
| 10140037 | 135709 | 14 | 71201859 | t/a | a | W |
| 8007249 | 136208 | 14 | 71202358 | a/g | g | R |
| 1990438 | 137091 | 14 | 71203241 | a/g | c | Y |
| 1990437 | 137499 | 14 | 71203649 | t/c | a | R |
| 10146484 | 137705 | 14 | 71203855 | a/g | a | R |
| 11627333 | 137726 | 14 | 71203876 | a/c | c | M |
| 7155802 | 137944 | 14 | 71204094 | g/a | a | R |
| 2109792 | 138175 | 14 | 71204325 | t/g | c | M |
| 11429363 | 138224 | 14 | 71204374 | a/— | c | N |
| 8004210 | 139319 | 14 | 71205469 | a/g | g | R |
| 2098194 | 139409 | 14 | 71205559 | c/t | g | R |
| 2109791 | 139597 | 14 | 71205747 | t/g | c | M |
| 11381729 | 140476 | 14 | 71206626 | —/a | a | N |
| 1160094 | 140808 | 14 | 71206958 | c/t | g | R |
| 11628051 | 141363 | 14 | 71207513 | a/t | t | W |
| 10136771 | 141655 | 14 | 71207805 | g/a | g | R |
| 10139903 | 142715 | 14 | 71208865 | a/c | c | M |
| 4903053 | 143253 | 14 | 71209403 | c/t | c | Y |
| 3742836 | 143911 | 14 | 71210061 | t/c | a | R |
| 3742835 | 144044 | 14 | 71210194 | g/a | c | Y |
| 8003233 | 144670 | 14 | 71210820 | t/g | g | K |
| 11621588 | 144961 | 14 | 71211111 | c/t | c | Y |
| 740981 | 146613 | 14 | 71212763 | g/c | g | S |
| 8019492 | 147413 | 14 | 71213563 | c/a | a | M |
| 8019644 | 147464 | 14 | 71213614 | g/a | a | R |
| 8019646 | 147468 | 14 | 71213618 | g/a | a | R |
| 8019653 | 147479 | 14 | 71213629 | a/g | a | R |
| 11450794 | 147488 | 14 | 71213638 | a/— | g | N |
| 11348193 | 147500 | 14 | 71213650 | —/a | a | N |
| 11450793 | 147527 | 14 | 71213677 | g/— | a | N |
| 11282735 | 147534 | 14 | 71213684 | aagagaagag/— | g | N |
| 2191823 | 149573 | 14 | 71215723 | g/t | a | M |
| 12232220 | 150798 | 14 | 71216948 | a/g | g | R |
| 11158976 | 154169 | 14 | 71220319 | c/t | c | Y |
| 4903054 | 155056 | 14 | 71221206 | c/t | c | Y |
| 11846755 | 155494 | 14 | 71221644 | t/c | t | Y |
| 12431988 | 157756 | 14 | 71223906 | g/a | g | R |
| 12100526 | 157830 | 14 | 71223980 | t/c | c | Y |
| 11622568 | 158379 | 14 | 71224529 | a/c | c | M |
| 9671230 | 159906 | 14 | 71226056 | c/t | t | Y |
| 12147487 | 159951 | 14 | 71226101 | a/t | a | W |
| 4903055 | 160135 | 14 | 71226285 | t/c | t | Y |
| 12147515 | 160209 | 14 | 71226359 | g/a | g | R |
| 11625092 | 160351 | 14 | 71226501 | c/t | c | Y |
| 4899442 | 160835 | 14 | 71226985 | t/g | t | K |
| 2052146 | 161110 | 14 | 71227260 | a/c | g | K |
| 10220553 | 161346 | 14 | 71227496 | a/t | a | W |
| 10220565 | 161670 | 14 | 71227820 | a/g | g | R |
| 2332917 | 163447 | 14 | 71229597 | g/c | c | S |
| 7158910 | 163479 | 14 | 71229629 | g/a | g | R |
| 8015749 | 164377 | 14 | 71230527 | a/g | a | R |
| 8006812 | 166328 | 14 | 71232478 | a/g | a | R |
| 8008338 | 166361 | 14 | 71232511 | c/t | t | Y |
| 2052145 | 167003 | 14 | 71233153 | t/g | a | M |
| 2052144 | 167036 | 14 | 71233186 | t/g | c | M |
| 10146692 | 167759 | 14 | 71233909 | a/g | g | R |
| 11627305 | 167829 | 14 | 71233979 | a/g | a | R |
| 2079989 | 168360 | 14 | 71234510 | c/t | a | R |
| 8018881 | 168582 | 14 | 71234732 | c/a | c | M |
| 4561387 | 169462 | 14 | 71235612 | a/t | a | W |
| 11622025 | 170317 | 14 | 71236467 | a/c | c | M |
| 740980 | 170669 | 14 | 71236819 | a/g | g | R |
| 12433250 | 171295 | 14 | 71237445 | t/c | c | Y |
| 5809590 | 171395 | 14 | 71237545 | —/a | a | N |
| 758915 | 171431 | 14 | 71237581 | t/c | a | R |
| 758914 | 171626 | 14 | 71237776 | a/t | t | W |
| 7154229 | 171735 | 14 | 71237885 | g/a | g | R |
| 12437188 | 171972 | 14 | 71238122 | t/c | t | Y |
| 7159108 | 172258 | 14 | 71238408 | t/a | a | W |
| 4903058 | 172448 | 14 | 71238598 | g/c | c | S |
| 4899443 | 172918 | 14 | 71239068 | c/a | a | M |
| 11848907 | 173415 | 14 | 71239565 | a/g | g | R |
| 12432148 | 173467 | 14 | 71239617 | g/t | t | K |
| 12435078 | 173697 | 14 | 71239847 | c/t | c | Y |
| 6574096 | 173991 | 14 | 71240141 | a/g | a | R |
| 11158977 | 174091 | 14 | 71240241 | t/a | a | W |
| 11629434 | 174571 | 14 | 71240721 | g/t | g | K |
| 4378563 | 177780 | 14 | 71243930 | c/t | c | Y |
| 2098195 | 178129 | 14 | 71244279 | c/g | c | S |
| 4633653 | 178693 | 14 | 71244843 | c/a | c | M |
| 7148350 | 179325 | 14 | 71245475 | g/a | g | R |
| 740979 | 179511 | 14 | 71245661 | a/t | a | W |
| 740978 | 179608 | 14 | 71245758 | g/c | g | S |
| 740977 | 179644 | 14 | 71245794 | a/g | t | Y |
| 740976 | 179808 | 14 | 71245958 | t/c | a | R |
| 4903059 | 180041 | 14 | 71246191 | c/t | t | Y |
| 4903060 | 181420 | 14 | 71247570 | g/a | a | R |
| 11852056 | 181423 | 14 | 71247573 | a/g | g | R |
| 9635257 | 181932 | 14 | 71248082 | c/t | c | Y |
| 9635258 | 181992 | 14 | 71248142 | c/t | c | Y |
| 9635259 | 182248 | 14 | 71248398 | a/g | a | R |
| 4899444 | 182335 | 14 | 71248485 | g/a | a | R |
| 12435382 | 184268 | 14 | 71250418 | g/a | g | R |
| 12435412 | 184366 | 14 | 71250516 | g/a | g | R |
| 11627381 | 184855 | 14 | 71251005 | g/a | a | R |
| 2052143 | 185532 | 14 | 71251682 | g/a | t | Y |
| 2052142 | 185633 | 14 | 71251783 | g/a | t | Y |
| 2052141 | 185717 | 14 | 71251867 | c/t | a | R |
| 8021035 | 186637 | 14 | 71252787 | a/g | g | R |
| 11158978 | 187010 | 14 | 71253160 | a/g | a | R |
| 11621216 | 187367 | 14 | 71253517 | a/t | a | W |
| 10130873 | 187524 | 14 | 71253674 | t/c | c | Y |
| 11621358 | 187525 | 14 | 71253675 | g/a | g | R |
| 758913 | 188352 | 14 | 71254502 | a/g | t | Y |
| 11622602 | 188360 | 14 | 71254510 | a/g | g | R |
| 10136931 | 189032 | 14 | 71255182 | c/t | c | Y |
| 740975 | 189100 | 14 | 71255250 | t/g | a | M |
| 747987 | 189444 | 14 | 71255594 | t/c | c | Y |
| 11623819 | 189450 | 14 | 71255600 | c/t | c | Y |
| 12434445 | 190431 | 14 | 71256581 | c/a | a | M |
| 8003375 | 190813 | 14 | 71256963 | t/a | a | W |
| 10143596 | 190983 | 14 | 71257133 | a/g | g | R |
| 12435321 | 191493 | 14 | 71257643 | t/c | c | Y |
| 12435401 | 191588 | 14 | 71257738 | a/g | g | R |
| 8010609 | 191764 | 14 | 71257914 | t/c | t | Y |
| 11158979 | 191811 | 14 | 71257961 | g/c | c | S |
| 11158980 | 192126 | 14 | 71258276 | c/t | t | Y |
| 11627524 | 192356 | 14 | 71258506 | c/a | c | M |
| 1126160 | 192953 | 14 | 71259103 | a/c | t | K |
| 10136074 | 194133 | 14 | 71260283 | g/c | c | S |
| 4903061 | 195333 | 14 | 71261483 | t/a | a | W |
| 10665398 | 195657 | 14 | 71261807 | —/ca | a | N |
| 6574097 | 195668 | 14 | 71261818 | a/c | a | M |
| 9671654 | 195676 | 14 | 71261826 | c/g | g | S |
| 10140024 | 195805 | 14 | 71261955 | c/t | c | Y |
| 10142421 | 195998 | 14 | 71262148 | g/a | a | R |
| 10142593 | 196066 | 14 | 71262216 | c/t | c | Y |
| 11423372 | 196415 | 14 | 71262565 | —/c | a | N |
| 5809592 | 196417 | 14 | 71262567 | —/c | c | N |
| 2332918 | 196538 | 14 | 71262688 | c/t | t | Y |
| 2332919 | 196569 | 14 | 71262719 | t/c | c | Y |
| 8007348 | 196621 | 14 | 71262771 | a/c | c | M |
| 1990443 | 196806 | 14 | 71262956 | g/a | c | Y |
| 8007690 | 196823 | 14 | 71262973 | c/g | c | S |
| 3937455 | 197204 | 14 | 71263354 | g/c | g | S |
| 8012823 | 197435 | 14 | 71263585 | c/t | c | Y |
| 4899445 | 197612 | 14 | 71263762 | g/a | a | R |
| 4903062 | 197854 | 14 | 71264004 | c/t | t | Y |
| 973963 | 198264 | 14 | 71264414 | g/a | t | Y |
| 10149962 | 198835 | 14 | 71264985 | t/g | g | K |
| 8003449 | 199275 | 14 | 71265425 | a/g | a | R |
| 11620775 | 199336 | 14 | 71265486 | c/t | c | Y |
| 8009089 | 199903 | 14 | 71266053 | a/g | g | R |
| 8008967 | 200017 | 14 | 71266167 | t/c | c | Y |
| 12050132 | 200141 | 14 | 71266291 | a/t | a | W |
| 10133018 | 200552 | 14 | 71266702 | t/c | c | Y |
| 1990442 | 200868 | 14 | 71267018 | t/c | a | R |
| 1990441 | 200983 | 14 | 71267133 | t/g | c | M |
| 8015833 | 200990 | 14 | 71267140 | c/t | t | Y |
| 1990440 | 201045 | 14 | 71267195 | g/c | g | S |
| 4903063 | 202426 | 14 | 71268576 | c/g | g | S |
| 10139810 | 202841 | 14 | 71268991 | c/a | c | M |
| 4903064 | 203311 | 14 | 71269461 | t/c | t | Y |
| 2159715 | 203543 | 14 | 71269693 | a/c | g | K |
| 2109795 | 203749 | 14 | 71269899 | a/g | t | Y |
| 2159714 | 204040 | 14 | 71270190 | g/a | c | Y |
| 11623107 | 204269 | 14 | 71270419 | a/c | c | M |
| 7152005 | 204309 | 14 | 71270459 | c/t | c | Y |
| 7152489 | 204426 | 14 | 71270576 | a/g | g | R |
| 4479167 | 205135 | 14 | 71271285 | g/c | g | S |
| 4606655 | 205269 | 14 | 71271419 | t/c | c | Y |
| 4606656 | 205323 | 14 | 71271473 | t/c | c | Y |
| 4489943 | 205364 | 14 | 71271514 | a/g | g | R |
| 7142642 | 206310 | 14 | 71272460 | g/c | c | S |
| 8006233 | 206600 | 14 | 71272750 | a/g | g | R |
| 8007559 | 206786 | 14 | 71272936 | t/a | t | W |
| 8006156 | 206796 | 14 | 71272946 | a/g | a | R |
| 1468662 | 207633 | 14 | 71273783 | a/g | c | Y |
| 11627048 | 207723 | 14 | 71273873 | g/a | g | R |
| 6574098 | 208026 | 14 | 71274176 | t/c | t | Y |
| 12433760 | 208627 | 14 | 71274777 | c/t | t | Y |
| 12433780 | 208662 | 14 | 71274812 | c/t | t | Y |
| 12434506 | 209109 | 14 | 71275259 | t/a | t | W |
| 12434673 | 209742 | 14 | 71275892 | t/c | t | Y |
| 12431400 | 209750 | 14 | 71275900 | t/c | c | Y |
| 12431384 | 209817 | 14 | 71275967 | g/a | a | R |
| 4903067 | 210191 | 14 | 71276341 | c/t | t | Y |
| 2332920 | 210349 | 14 | 71276499 | g/a | a | R |
| 2215591 | 210724 | 14 | 71276874 | a/g | t | Y |
| 12433064 | 211537 | 14 | 71277687 | c/a | c | M |
| 12436263 | 211551 | 14 | 71277701 | t/g | t | K |
| 12433097 | 211659 | 14 | 71277809 | g/a | a | R |
| 12433184 | 211757 | 14 | 71277907 | g/t | g | K |
| 8015900 | 211821 | 14 | 71277971 | a/t | t | W |
| 11296981 | 212236 | 14 | 71278386 | t/— | t | N |
| 11344025 | 212237 | 14 | 71278387 | t/— | t | N |
| 11464204 | 212442 | 14 | 71278592 | —/a | t | N |
| 11441172 | 212445 | 14 | 71278595 | —/t | a | N |
| 11381807 | 212455 | 14 | 71278605 | t/— | t | N |
| 10873251 | 212730 | 14 | 71278880 | g/a | a | R |
| 2109794 | 212746 | 14 | 71278896 | t/c | g | R |
| 10873252 | 212836 | 14 | 71278986 | t/c | t | Y |
| 4520784 | 212886 | 14 | 71279036 | g/a | g | R |
| 2877820 | 213028 | 14 | 71279178 | a/t | t | W |
| 2877821 | 213029 | 14 | 71279179 | a/t | t | W |
| 4569195 | 213095 | 14 | 71279245 | c/g | c | S |
| 11628905 | 214247 | 14 | 71280397 | a/c | c | M |
| 2191822 | 214807 | 14 | 71280957 | t/c | a | R |
| 2191821 | 214921 | 14 | 71281071 | a/c | t | K |
| 11464689 | 215163 | 14 | 71281313 | t/— | t | N |
| 12431959 | 215406 | 14 | 71281556 | g/a | g | R |
| 4903068 | 216069 | 14 | 71282219 | a/g | a | R |
| 1544579 | 216849 | 14 | 71282999 | t/c | a | R |
| 7155879 | 217130 | 14 | 71283280 | g/t | g | K |
| 12433603 | 217143 | 14 | 71283293 | c/g | c | S |
| 11351432 | 217657 | 14 | 71283807 | a/— | a | N |
| 11448438 | 217725 | 14 | 71283875 | —/g | g | N |
| 4243643 | 218435 | 14 | 71284585 | g/a | g | R |
| 4140952 | 218717 | 14 | 71284867 | t/c | a | R |
| 8005372 | 218812 | 14 | 71284962 | c/t | t | Y |
| 8004109 | 218826 | 14 | 71284976 | t/c | c | Y |
| 8008398 | 218872 | 14 | 71285022 | a/c | c | M |
| 8009692 | 218890 | 14 | 71285040 | t/c | t | Y |
| 2332921 | 218944 | 14 | 71285094 | c/a | c | S |
| 12050320 | 219229 | 14 | 71285379 | a/g | g | R |
| 12050323 | 219300 | 14 | 71285450 | a/g | g | R |
| 8010316 | 219757 | 14 | 71285907 | a/g | g | R |
| 7154293 | 220533 | 14 | 71286683 | t/c | t | Y |
| 12147969 | 221534 | 14 | 71287684 | c/t | c | Y |
| 2215590 | 221632 | 14 | 71287782 | g/a | c | Y |
| 4265749 | 222234 | 14 | 71288384 | c/t | c | Y |
| 1004552 | 222241 | 14 | 71288391 | c/t | a | R |
| 4307892 | 222458 | 14 | 71288608 | g/a | g | R |
| 12431973 | 222735 | 14 | 71288885 | t/g | g | K |
| 12431975 | 222749 | 14 | 71288899 | a/g | g | R |
| 767874 | 223187 | 14 | 71289337 | t/c | t | Y |
| 11628597 | 226626 | 14 | 71292776 | g/c | c | S |
| 10129371 | 226865 | 14 | 71293015 | a/g | a | R |
| 4903069 | 227548 | 14 | 71293698 | a/c | a | M |
| 4903070 | 227690 | 14 | 71293840 | a/g | a | R |
| 4903071 | 227815 | 14 | 71293965 | g/t | g | K |
| 11622224 | 228456 | 14 | 71294606 | t/c | c | Y |
| 10459455 | 229025 | 14 | 71295175 | g/a | g | R |
| 9323577 | 229085 | 14 | 71295235 | c/t | c | Y |
| 10624648 | 231757 | 14 | 71297907 | ttg/— | c | N |
| 3058953 | 231762 | 14 | 71297912 | gtt/— | t | N |
| 11158981 | 232727 | 14 | 71298877 | t/g | g | K |
| 11158982 | 232955 | 14 | 71299105 | t/g | t | K |
| 11158983 | 233302 | 14 | 71299452 | g/t | t | K |
| 1860750 | 233629 | 14 | 71299779 | t/a | t | W |
| 1860749 | 233670 | 14 | 71299820 | g/a | c | Y |
| 1860748 | 233702 | 14 | 71299852 | a/c | t | K |
| 1860747 | 233715 | 14 | 71299865 | a/g | c | Y |
| 11419679 | 235827 | 14 | 71301977 | —/a | a | N |
| 8011777 | 236951 | 14 | 71303101 | t/c | t | Y |
| 6574099 | 237157 | 14 | 71303307 | a/g | a | R |
| 8010957 | 237317 | 14 | 71303467 | a/g | a | R |
| 11626895 | 237363 | 14 | 71303513 | g/a | g | R |
| 10151431 | 238866 | 14 | 71305016 | t/g | g | K |
| 4903072 | 239789 | 14 | 71305939 | c/a | c | M |
| 4589489 | 240170 | 14 | 71306320 | t/c | c | Y |
| 9671327 | 240430 | 14 | 71306580 | g/t | g | K |
| 4899446 | 240454 | 14 | 71306604 | c/t | t | Y |
| 10144501 | 240688 | 14 | 71306838 | t/a | t | W |
| 5809594 | 241414 | 14 | 71307564 | tg/— | g | N |
| 720317 | 241424 | 14 | 71307574 | a/g | a | R |
| 8014316 | 241741 | 14 | 71307891 | g/a | a | R |
| 11158984 | 241768 | 14 | 71307918 | t/c | c | Y |
| 6420906 | 242360 | 14 | 71308510 | c/t | c | Y |
| 8004055 | 242957 | 14 | 71309107 | a/t | a | W |
| 12434800 | 243355 | 14 | 71309505 | a/g | g | R |
| 4243644 | 243596 | 14 | 71309746 | t/a | t | W |
| 4899447 | 243648 | 14 | 71309798 | a/g | a | R |
| 4903073 | 243664 | 14 | 71309814 | g/a | a | R |
| 11848634 | 243783 | 14 | 71309933 | t/c | c | Y |
| 4899448 | 243819 | 14 | 71309969 | t/c | t | Y |
| 10131564 | 245765 | 14 | 71311915 | a/g | g | R |
| 10134150 | 246089 | 14 | 71312239 | t/g | g | K |
| 763388 | 246457 | 14 | 71312607 | a/g | c | Y |
| 11845938 | 246485 | 14 | 71312635 | a/g | g | R |
| 11845946 | 246536 | 14 | 71312686 | g/t | g | K |
| 11845915 | 246586 | 14 | 71312736 | t/c | c | Y |
| 10137463 | 247356 | 14 | 71313506 | a/c | a | M |
| 6574100 | 247573 | 14 | 71313723 | t/a | a | W |
| 7140344 | 248173 | 14 | 71314323 | a/g | g | R |
| 10646889 | 248915 | 14 | 71315065 | aa/— | a | N |
| 7146287 | 249344 | 14 | 71315494 | c/t | c | Y |
| 10605948 | 250079-250082 | 14 | 71316232 | cccc/— | c | NNNN |
| 5809595 | 250575 | 14 | 71316725 | a/— | a | N |
| 1035099 | 250701 | 14 | 71316851 | t/a | a | W |
| 7159877 | 251260 | 14 | 71317410 | t/g | t | K |
| 7142579 | 251858 | 14 | 71318008 | g/a | g | R |
| 12431762 | 251981 | 14 | 71318131 | g/a | g | R |
| 12431764 | 251990 | 14 | 71318140 | g/a | g | R |
| 10647999 | 252326 | 14 | 71318476 | agaaagaaag/— | a | N |
| 6574101 | 252727 | 14 | 71318877 | c/t | c | Y |
| 6574102 | 252946 | 14 | 71319096 | t/c | c | Y |
| 1861162 | 254199 | 14 | 71320349 | t/c | g | R |
| 12432972 | 254985 | 14 | 71321135 | t/c | t | Y |
| 10146134 | 255324 | 14 | 71321474 | a/t | a | W |
| 10146616 | 255686 | 14 | 71321836 | a/c | c | M |
| 10146769 | 255718 | 14 | 71321868 | a/g | g | R |
| 8018936 | 256321 | 14 | 71322471 | g/a | g | R |
| 10483849 | 257562 | 14 | 71323712 | g/a | a | R |
| 2160137 | 258843 | 14 | 71324993 | t/c | a | R |
| 2192595 | 258880 | 14 | 71325030 | c/a | g | K |
| 2192594 | 259060 | 14 | 71325210 | a/g | c | Y |
| 11271695 | 261590 | 14 | 71327740 | tccatatggctgaggagg/— | t | N |
| 10747301 | 262088 | 14 | 71328238 | g/c | c | S |
| 12050363 | 262345 | 14 | 71328495 | c/g | g | S |
| 12050368 | 262368 | 14 | 71328518 | g/a | g | R |
| 12432949 | 263858 | 14 | 71330008 | a/g | g | R |
| 7401375 | 263995 | 14 | 71330145 | t/a | a | W |
| 8019682 | 265195 | 14 | 71331345 | g/a | g | R |
| 8021248 | 265620 | 14 | 71331770 | t/c | t | Y |
| 11158985 | 265833 | 14 | 71331983 | t/a | a | W |
| 10483850 | 266387 | 14 | 71332537 | a/g | a | R |
| 8010875 | 267130 | 14 | 71333280 | a/g | g | R |
| 11626844 | 267468 | 14 | 71333618 | t/c | c | Y |
| 982972 | 267606 | 14 | 71333756 | a/g | c | Y |
| 7161198 | 268858 | 14 | 71335008 | t/c | t | Y |
| 7160347 | 269193 | 14 | 71335343 | g/a | a | R |
| 8007139 | 269991 | 14 | 71336141 | a/g | a | R |
| 8014483 | 271840 | 14 | 71337990 | c/t | c | Y |
| 12437072 | 272592 | 14 | 71338742 | t/c | t | Y |
| 8004767 | 273399 | 14 | 71339549 | c/g | c | S |
| 12588830 | 273504 | 14 | 71339654 | a/g | g | R |
| 7158449 | 274050 | 14 | 71340200 | t/c | c | Y |
| 6574103 | 274182 | 14 | 71340332 | c/t | c | Y |
| 8020478 | 274275 | 14 | 71340425 | c/t | c | Y |
| 4903077 | 276293 | 14 | 71342443 | c/t | t | Y |
| 8012359 | 276645 | 14 | 71342795 | g/a | a | R |
| 4899449 | 277166 | 14 | 71343316 | a/g | g | R |
| 10690289 | 278290 | 14 | 71344440 | aag/— | a | N |
| 6574104 | 278646 | 14 | 71344796 | g/t | t | K |
| 2110552 | 279022 | 14 | 71345172 | a/g | t | Y |
| 8008256 | 279073 | 14 | 71345223 | g/a | a | R |
| 759283 | 280198 | 14 | 71346348 | g/t | c | M |
| 4999177 | 281100 | 14 | 71347250 | a/g | g | R |
| 2333006 | 281145 | 14 | 71347295 | c/g | c | S |
| 8006178 | 282655 | 14 | 71348805 | a/c | a | M |
| 11158986 | 282836 | 14 | 71348986 | a/c | a | M |
| 7150625 | 283537 | 14 | 71349687 | c/t | t | Y |
| 8007768 | 283976 | 14 | 71350126 | t/g | t | K |
| 8007058 | 284149 | 14 | 71350299 | a/g | g | R |
| DPF3-AA | 284742 | 14 | 71350892 | c/a | a | M |
| 2215901 | 284840 | 14 | 71350990 | c/t | a | R |
| 3814866 | 284912 | 14 | 71351062 | t/g | a | M |
| 3814864 | 285091 | 14 | 71351241 | t/c | c | Y |

Assay for Verifying and Allelotyping SNPs

[0393] The methods used to verify and allelotype the proximal SNPs of Table 41 are the same methods described in Examples 1 and 2 herein. The PCR primers and extend primers used in these in Table 42 and Table 43, respectively.

TABLE 42

| | | |
|---|---|---|
| dbSNP rs# | Forward PCR primer | Reverse PCR primer |

| | | |
|---|---|---|
| 11846274 | ACGTTGGATGTTCACTGTGATGTGGTTGCG | ACGTTGGATGAGGAACCACGAAAGAGTGGG |
| 2526935 | ACGTTGGATGCATTGCCTCTTGCAGATGAG | ACGTTGGATGATGAAAGCTGTGTCAGACTC |
| 929328 | ACGTTGGATGCCACAGAGAAGCTATAGCTC | ACGTTGGATGAAGCAAAATGCCTGGGCTTG |
| 3742840 | ACGTTGGATGTGCTTGTCAGATCCTAGCTT | ACGTTGGATGCGGTTATTCCTAATGCTGTC |
| 9671739 | ACGTTGGATGAGCTGCTTGTGGGTTTCTGG | ACGTTGGATGAGGGAAAAGACCACTGTGGG |
| 8006208 | ACGTTGGATGAAGCAACTTGAAGGCTAGGC | ACGTTGGATGCAATGCTCTAGGTCCTGTAG |
| 8006230 | ACGTTGGATGATTAAAACCCTTGGCAGGGC | ACGTTGGATGTGCGGTTTATTTTCCAGCCC |
| 8007836 | ACGTTGGATGAGCTTGGATGGACTCTGTTC | ACGTTGGATGGAATGGTCAGATGCTTAGGG |
| 8006889 | ACGTTGGATGGAATGGTCAGATGCTTAGGG | ACGTTGGATGAGCTTGGATGGACTCTGTTC |
| 8010823 | ACGTTGGATGGCTTTCCCAAATGCCATGTG | ACGTTGGATGTTATCTCAGAGCAGAGGAGG |
| 8011029 | ACGTTGGATGTGATAGATGCTAAGGAGTGG | ACGTTGGATGATGTTGAAAATGTGCACGGG |
| 10649920 | ACGTTGGATGCTTAGCATCTATCACGGCAG | ACGTTGGATGTTGCCCTTCCATGTCTACTC |
| 2803956 | ACGTTGGATGTTGCATCCCTTTGATAGCAG | ACGTTGGATGCCTTCGTTCACCTATGCTTC |
| 2803957 | ACGTTGGATGGGTTCATTAAGTAGGGCGTG | ACGTTGGATGAGAACAGGAATGCCCATGTG |
| 2526934 | ACGTTGGATGAGTCTGTAGGGTTGTGTTGC | ACGTTGGATGAGTGGGCCTTGTAGGAAATG |
| 9671558 | ACGTTGGATGACAGAAGCTGGAACAAAGGG | ACGTTGGATGATTTGGAAGTGAGTGGGTTC |
| 2526933 | ACGTTGGATGAGCTGTCAGGAAACTCTGAG | ACGTTGGATGGAGTTCCCTGTTCCTTCTAG |
| 2803959 | ACGTTGGATGAAGGAGGGGAGAGGAAGATG | ACGTTGGATGTCTAAGGCAGTTCCCACTCG |
| 2526932 | ACGTTGGATGCTCTTCCTGCTGTGTGTTGC | ACGTTGGATGTTCCCCTTCACCTGGTATCC |
| 2803960 | ACGTTGGATGCTCTGCAAAGTGGACAGAGC | ACGTTGGATGCCTGGTATCCAAAAGCATGC |
| 12434675 | ACGTTGGATGTTTTTAGCCTGTCGTGGAAG | ACGTTGGATGCTCTGGCCAGAGCCAACTTC |
| 4899435 | ACGTTGGATGAGAACTTTGCTGGGCTTCAC | ACGTTGGATGAACAGGATTTCCACTTCCGG |
| 2526931 | ACGTTGGATGATCCAGCATGGTCTTTGCAG | ACGTTGGATGAATAGCTACCATGGAGTGGG |
| 2803961 | ACGTTGGATGTCACATGTCTGTAAGGTGGG | ACGTTGGATGGGCCAGGATCTTTACCAATG |
| 2803962 | ACGTTGGATGGGCTAATGCACACAAGAAGG | ACGTTGGATGTAAACAAGCACTGCAGAGCC |
| 12590634 | ACGTTGGATGCTTTTAAGCTATTGTGGCAC | ACGTTGGATGCTCCAAAGGCTAATAATTGG |
| 11327712 | ACGTTGGATGAAAGCAGGCTGTCTCCAAAG | ACGTTGGATGTGGCACTTGGGAACATTTGG |
| 2803963 | ACGTTGGATGTTCCAACACACAGAGTTCTC | ACGTTGGATGCCAAACATGCAGGACTCTTG |
| 11844834 | ACGTTGGATGTGGAGATCCTAAAGCAGAGC | ACGTTGGATGTTTCCTTGCAGTTGGTCTGG |
| 11320415 | ACGTTGGATGTCATCTCCACTGCATGTCTG | ACGTTGGATGAAACTGAGGCACAGTCCAAG |
| 8012752 | ACGTTGGATGGAGGTGTTAGTCACAGAAGG | ACGTTGGATGATCCTACCCCCATTTTAGGG |
| 11623878 | ACGTTGGATGTAAGTGCTGGGATTACAGGC | ACGTTGGATGTCCTTTACGTTACATGCCTG |
| 11623926 | ACGTTGGATGACCTGTAATCCCAGCTACTC | ACGTTGGATGATCTTGGCTCACTGCAACCT |
| 12434442 | ACGTTGGATGCTGCAATCTGATCGTATCAC | ACGTTGGATGTTGTCATGCTAAAACCCGTC |
| 2526930 | ACGTTGGATGTGAAGAGAGCAGGAGAGAAG | ACGTTGGATGTAGGACCTTCACTTGCCATC |
| 12435306 | ACGTTGGATGAGGGATTTACCCTGGATATC | ACGTTGGATGATCCAGGAACCAGGAATCAC |
| 10144028 | ACGTTGGATGCTGACCATGTGAGAGGAATC | ACGTTGGATGT1TGTTGACTTGGCAGAGCC |
| 4899436 | ACGTTGGATGCTGTAAAGCCAAAGACCAGC | ACGTTGGATGTCATTCCTTCCTACAGCTGC |
| 7140593 | ACGTTGGATGTAACCAAATTCATTTGCCTC | ACGTTGGATGGTAGAGAGCTACATTTCTTG |
| 2107687 | ACGTTGGATGAAGTGATTCCAGGTCTGGAG | ACGTTGGATGGGATCCTGAGTCCTTTTGAC |
| 991882 | ACGTTGGATGCTGCACCACAAATACTGTAC | ACGTTGGATGTCTAGCATACGTAGTTTCAG |
| 3327 | ACGTTGGATGGTTTCTGGTCCTTTGTCCTC | ACGTTGGATGTTTGGCAGCATGTACCACAG |
| 2526928 | ACGTTGGATGCATGTTAAGAAGATATCCCAC | ACGTTGGATGTGATTCTTTCCCTTTGTCAG |
| 7401336 | ACGTTGGATGCTCTAGCCCTAACAATTGAC | ACGTTGGATGCTCATGACTGTATTTGACTG |
| 2526926 | ACGTTGGATGGGCCCATACATTGCAATTAG | ACGTTGGATGTGGAGGGAAAAGTCTATGTG |
| 994760 | ACGTTGGATGAGGAAGCCAGAAACAACAGC | ACGTTGGATGGGGCATCAATGTGTTTCCAG |
| 994759 | ACGTTGGATGGACGTAGGGAAAAAAATGGG | ACGTTGGATGTCTGTTTTGCCCTTGATCTG |
| 994758 | ACGTTGGATGTCATCAACTGGTTACACCTG | ACGTTGGATGAGATCAAGGGCAAAACAGAG |
| 11848404 | ACGTTGGATGACTTCCTTCTGTAGTCCGTG | ACGTTGGATGCCTAAAGTATCCATGCCCAC |
| 2526925 | ACGTTGGATGCTTTTAGGATAGACCTGGCC | ACGTTGGATGACGGACTACAGAAGGAAGTG |
| 11844236 | ACGTTGGATGCTTCTATGTGGCATGGAAGG | ACGTTGGATGTCTGGGCAGATTCTGATCTG |
| 2526924 | ACGTTGGATGGTCAGTAATTGGCTTTGCCC | ACGTTGGATGTGGATGACATTCCCAAGTCG |
| 2803965 | ACGTTGGATGCTAATAACCCTCTCAAGGTG | ACGTTGGATGTTTCAAGAATATCAGCTGGC |
| 2526923 | ACGTTGGATGCCAGCCAGCTTAGGATAACT | ACGTTGGATGTTCTGTCTAGCACAATGGCC |
| 7152467 | ACGTTGGATGGTACATGTAAAACTAGTCAC | ACGTTGGATGAGCACAATATCAAAACCAGG |
| 11623462 | ACGTTGGATGGAGGAAGGAAGGATGAAGGG | ACGTTGGATGCCTCCTAACTAGCTTCCTGG |
| 2803966 | ACGTTGGATGTCTTCAAACCCGAAGCAAGG | ACGTTGGATGTGCTAAGGCCCATCTTAGTC |
| 2526922 | ACGTTGGATGAATGAGACTTCTTACCTGCC | ACGTTGGATGGAACCTTAGAAACAAGCTGC |
| 2526920 | ACGTTGGATGACACCAAGTTCACCACTGAC | ACGTTGGATGCCCGGATGTTCCTCTAAATG |
| 11848135 | ACGTTGGATGCGTGCATAGAAATTGGCAGC | ACGTTGGATGTTGAGTGAGAAGGCACACAG |
| 11629210 | ACGTTGGATGGTTTCATATTCACAGCTGCC | ACGTTGGATGCCTAAAAGGCTGGAAATACC |
| 2803967 | ACGTTGGATGTGATTGAATTAGGGCTCCAG | ACGTTGGATGAGACCATGCTGATTCCAAAG |
| 16455 | ACGTTGGATGTGATTCTTGCCCCACAACAG | ACGTTGGATGATTGATGTTGGGCTCTGGGC |
| 757655 | ACGTTGGATGAACAGTGTGTGAAGGTCAGG | ACGTTGGATGAGCAAATGTCAAGGCTTGGC |
| 5809581 | ACGTTGGATGTCACTGCTGTTTTCCACCAG | ACGTTGGATGCTTCCTACTGTCCTGAGTAC |
| 3057139 | ACGTTGGATGTCACTGCTGTTTTCCACCAG | ACGTTGGATGCTTCCTACTGTCCTGAGTAC |
| 2247658 | ACGTTGGATGTGAGTAGCTGGGACTACAGG | ACGTTGGATGTAACACGGTGAAACCCCGTC |
| 11625609 | ACGTTGGATGCAAGCTGGGCCTTAAAGGAT | ACGTTGGATGTGCCTTTCCCTGTAATGCTG |
| 8005580 | ACGTTGGATGGCAGGGAAAAGAGGAATTGC | ACGTTGGATGCATGCCTACATAAGAGGCTC |
| 8010472 | ACGTTGGATGTGGATTTAGTGACTGGTCCC | ACGTTGGATGGAGATGAGTCTGGTGATAGG |
| 2526919 | ACGTTGGATGAGGGAGAAGTATCTGGAGAG | ACGTTGGATGCATCTGTCACTTGATGGTGG |
| 2803968 | ACGTTGGATGGGGAACACTTCTGTCCTTTC | ACGTTGGATGTGAGAGGAGCACAAAAGACG |
| 11623943 | ACGTTGGATGATTGAAAGGAGCCAGTGAGG | ACGTTGGATGGGAAGGATCCCCTTTTTGTC |
| 11623946 | ACGTTGGATGATTGAAAGGAGCCAGTGAGG | ACGTTGGATGGGAAGGATCCCCTTTTTGTC |
| 1557926 | ACGTTGGATGAAATCGGGAGGTGGAGAATG | ACGTTGGATGACAATCGAGACACCCACAAC |
| 12434611 | ACGTTGGATGAATCTGACCTCCTTTCAGGG | ACGTTGGATGTAATGTCTGCCCTGGGTATG |
| 2526918 | ACGTTGGATGGTATGCAAACTCTAGACCAG | ACGTTGGATGCCAATCTGCATGGATAAGAC |
| 5809582 | ACGTTGGATGAGAGTGAAACCCTATCTCTG | ACGTTGGATGGGTCACATACTTCTGTCTTC |
| 8008279 | ACGTTGGATGTCAGAGATAGGGTTTCACTC | ACGTTGGATGGGTGCAGTGAACCAAGATTG |
| 2803969 | ACGTTGGATGAAAATTAGCCAGGCATGGTG | ACGTTGGATGAATCCTTCCTCCTCAGCATC |
| 2526917 | ACGTTGGATGATCCCTTCTTACCAGCTTGG | ACGTTGGATGTACAGGTATGTGCCACCATG |
| 8008774 | ACGTTGGATGAGGAATGGGTTGATGCCTTC | ACGTTGGATGCCAAGCTGGTAAGAAGGGAT |
| 2803970 | ACGTTGGATGCCAAGCTGGTAAGAAGGGAT | ACGTTGGATGAGGAATGGGTTGATGCCTTC |
| 8010255 | ACGTTGGATGCTTTTCTGTGGTATGGTGGG | ACGTTGGATGTAGCATTGCAAGCCTCTTTG |
| 2997642 | ACGTTGGATGGCCACAGCTGCCTTTTTAAG | ACGTTGGATGGTGGGATGCGGCAAATACTT |
| 2803971 | ACGTTGGATGAGTGAGAGACCTTTGTGTGC | ACGTTGGATGCCCACCATACCACAGAAAAG |
| 11313760 | ACGTTGGATGCTCACTATCTCTCAACTCCC | ACGTTGGATGATGGGCCCACTTTTGTGTAG |
| 2803972 | ACGTTGGATGTGCAGTCCCTAGGTCAGATC | ACGTTGGATGTACACTCCGGCTACACAAAA |
| 4903038 | ACGTTGGATGACAAGATCCCCAGGTGATTC | ACGTTGGATGAGAGAGTGAAGACTGAGTGG |
| 2526916 | ACGTTGGATGTTCTCTACCCTCTAACGCAG | ACGTTGGATGTTAGTGGCTGCAGAGCTGTA |
| 4903040 | ACGTTGGATGACCAAAGTCCTGGGAGGATG | ACGTTGGATGACTCATGGGCTTGGAGTCAG |
| 2803974 | ACGTTGGATGATCTGCTTACAGCTCTGCAG | ACGTTGGATGTCTGGATGCACTTCGTAAAG |
| 2803975 | ACGTTGGATGCTGATGACTACTGCTTACCC | ACGTTGGATGCTGGGATGTGTGTTTGAAGG |
| 2803976 | ACGTTGGATGGCAACCTAATTAGATTGCACC | ACGTTGGATGTTGGCTCAGGTATATTCCTC |
| 2803977 | ACGTTGGATGAGCCCCAGAACAAGCATTAC | ACGTTGGATGCTCGTGATTTTTGGCTCAGG |
| 10139909 | ACGTTGGATGTTTATTGAGGGCAGTGAGGC | ACGTTGGATGTATGGTGAGAAGTGGTACTG |
| 722945 | ACGTTGGATGTTCTTTAATCTCGCCAGGAG | ACGTTGGATGATAGGTGCATGAGCAGTGAC |
| 917069 | ACGTTGGATGGCTTGTTTGTATGCTGGCTG | ACGTTGGATGCCTGAGAATTTTGCTCCTGC |
| 2803978 | ACGTTGGATGTTATGTGGACTCACTTCCCC | ACGTTGGATGCAGAAAGAGGTTCATGCTGG |
| 2332890 | ACGTTGGATGTTGTCATGGTGGTTGGGAAC | ACGTTGGATGTGGGATGAGGATTTTCCCAC |
| 1989638 | ACGTTGGATGAGAGTGAGGACAGAGAGAAG | ACGTTGGATGCCCTTCTTCTCTGTATCCTG |
| 10679174 | ACGTTGGATGAGCGCCTCATAAAGTTGTAG | ACGTTGGATGCTCAATTGTCTCACTCATCC |
| 2526915 | ACGTTGGATGTTCCCAGTGCTTGTTTCCTG | ACGTTGGATGGGCAGAGACAGGATGAAAAC |
| 2526914 | ACGTTGGATGATAAAGGCCCTCCCTGAATG | ACGTTGGATGGATCCTCGCCTTTAACTCTG |
| 11158964 | ACGTTGGATGGAAGGAAACAGACAGCAGAG | ACGTTGGATGAGAAAAGAGACTGGATAAAG |
| 11158965 | ACGTTGGATGGGGCTGCTCCTTCTTCCTGT | ACGTTGGATGTTCTGATGTGCATTCATCCTT |
| 740081 | ACGTTGGATGACTTTCTTCTTCCATCCCCC | ACGTTGGATGAGCCTCTCTAAGAAGTGCTC |
| 740080 | ACGTTGGATGTCCCCAGATTTCTTTGCCTC | ACGTTGGATGTGGAGGTGGAATCTCCTTTG |
| 10140582 | ACGTTGGATGACGTTGGCTGGCTGTGAGAC | ACGTTGGATGAAGAGGCAAAGAAATCTGGG |
| 2526913 | ACGTTGGATGGCAAGAGTGGGAAATACCTG | ACGTTGGATGATTCACGCTCATCTCTGCTC |
| 4899437 | ACGTTGGATGTCCAGAACAGAAAAGGTGCC | ACGTTGGATGAAAGGCAGTGGTGATTGCTG |
| 10145678 | ACGTTGGATGTCTGCTTCAGAAAAGAAGTG | ACGTTGGATGGGTACAATCCTTGCTACTTC |
| 2107686 | ACGTTGGATGGAGGTCATTCAACCAAAATC | ACGTTGGATGACATCATCTTTGGTGCATGG |
| 2107685 | ACGTTGGATGTGTCTTGCCACTGCATTCAC | ACGTTGGATGCTGAAGCAATGTCTCAAGCC |
| 2107684 | ACGTTGGATGGTCAACAAAAGGCTTGAGAC | ACGTTGGATGGGAGAAGATTAGTTTCACGG |
| 7154188 | ACGTTGGATGCCCCAACTCTATGCAAGAGA | ACGTTGGATGCAAGCAGTTCTTTTGACACC |
| 4903041 | ACGTTGGATGGAAAGATCAGGTAACCAAACG | ACGTTGGATGGAGGAGAAAGAGTCTTCAAAC |
| 7159637 | ACGTTGGATGCCAAGTTCTACCCTGTGATC | ACGTTGGATGGAAGACTCTTTCTCCTCCTG |
| 6574089 | ACGTTGGATGGGTTCTAGTTACATGGAGTG | ACGTTGGATGGATGACCAGTTGTCTATTAC |
| 12589753 | ACGTTGGATGAGTCAGGATACTGCTAGAGG | ACGTTGGATGGGCATGCCTTGTTCAGATTC |
| 4899438 | ACGTTGGATGTATCTTTGGGCTGCTCACAG | ACGTTGGATGCATCCTGGATCTCCTCTATC |
| 4903042 | ACGTTGGATGCCGCATTTAGCTTATCCACG | ACGTTGGATGGTCACTATAGGAAGTGGGTG |
| 4903043 | ACGTTGGATGCCGCATTTAGCTTATCCACG | ACGTTGGATGGTCACTATAGGAAGTGGGTG |
| 2803980 | ACGTTGGATGTCATTGCATGTGTAAACCGC | ACGTTGGATGTATAGGAAGTGGGTGATGTG |
| 10483848 | ACGTTGGATGAAAAAAACCCTAAGGAGGGC | ACGTTGGATGCGTTATGCCTTGCATTATGG |
| 2240344 | ACGTTGGATGAACACTGTGACTCAAGGACC | ACGTTGGATGTTTCCCTCCCTTGTAAGCAG |
| 2286068 | ACGTTGGATGAATTCAGTTGCTGGTGGGAG | ACGTTGGATGTACATCCCATCGGCCAAAAC |
| 11339669 | ACGTTGGATGATTCCTTCCTGAGCTAGACC | ACGTTGGATGAGGCAAGCCCCTTTTATCTG |
| 3854 | ACGTTGGATGCTCTAAAGAAAAATGCCCCAC | ACGTTGGATGTAAAAAGCCTGAGAGAGCAG |
| 11463 | ACGTTGGATGGAACACAAACAAACTGATGG | ACGTTGGATGACTTTTGAAGTAGGAGGTAC |
| 1383 | ACGTTGGATGAATCAGGGTAGTGTGTCCAG | ACGTTGGATGTAGCAACTGACCTGCCCTAT |
| 1381 | ACGTTGGATGTAGCAACTGACCTGCCCTAT | ACGTTGGATGAATCAGGGTAGTGTGTCCAG |
| 1377 | ACGTTGGATGAAGAGATCAGCCAGGAATAG | ACGTTGGATGTACACCACCTGGGAATTGAC |
| 11158966 | ACGTTGGATGGCAGAACTGGGTGTTAGCAA | ACGTTGGATGTAAAGGTCCTTTCTGGGGTG |
| 11158967 | ACGTTGGATGTTCCCCTCCACTTAGAAACC | ACGTTGGATGTTTCTACTTGGATGGCAGGG |
| 11158968 | ACGTTGGATGTAAAACACCCCAGAAAGGAC | ACGTTGGATGGGCTGAATTGGTTCTATACC |
| 11158969 | ACGTTGGATGTGATGTCATCTCTCTCCCTG | ACGTTGGATGCAAATGAGGCATCTGATGGG |
| 11158970 | ACGTTGGATGGGTATAGAACCAATTCAGCC | ACGTTGGATGAAGGAAGCAGTGTCCTTTTG |
| 11158971 | ACGTTGGATGTGGAACTGGTCTCTTGGTTG | ACGTTGGATGTCACAAGCACTCACACTCAG |
| 11849782 | ACGTTGGATGTAAGCTGAGCGATAAGGGAG | ACGTTGGATGGAGCTTTTTTCCTTGCTGGC |
| 10137616 | ACGTTGGATGTTATGGCACACTGGTGTCAG | ACGTTGGATGAACAGATGGCGTGTTCCTTG |
| 757572 | ACGTTGGATGTCCTATCCTTGACAGTGCTG | ACGTTGGATGACCTCGGTTCATTTGGCAAC |
| 10140566 | ACGTTGGATGTGTTGTATCCTTCTCAGTGC | ACGTTGGATGAAAGGCCAAATGTCTGAGTC |
| 2023480 | ACGTTGGATGAACAGCATCCAAGCCTGAAC | ACGTTGGATGCCATGTCCTCTTACAAGTCC |
| 2526911 | ACGTTGGATGGGTGTCTTTGATCTGGTGTG | ACGTTGGATGAATVCACACAGGGAGCTGAG |
| 4903044 | ACGTTGGATGCCTAACAGATGAGTCTGCTC | ACGTTGGATGCCCAGTATACCTCCTGTTAC |
| 11845162 | ACGTTGGATGCATCCCTTTAAGGGTTCCTG | ACGTTGGATGCCCTCCAGTGCTGTATAAAG |
| 12147210 | ACGTTGGATGTTACTGAGCTGAGGGCAAAG | ACGTTGGATGACACACCTTTCTGTTGTTGC |
| 2997643 | ACGTTGGATGTGTCCTTGGTTTCCAACCAC | ACGTTGGATGCCCAGAATAATGCCTCACAC |
| 2997644 | ACGTTGGATGAGTTAAGTTGGAGGGACTGG | ACGTTGGATGTCTTCTCTCGGAGCTTCCTT |
| 3814867 | ACGTTGGATGATCCCTGCATTTGGAAGTCG | ACGTTGGATGCGTCAGTAGAGCTGCTGTTT |
| 2286067 | ACGTTGGATGACCGGGTTAATCCCTTTGGT | ACGTTGGATGTGGGTTAAGCAACAGACAGC |
| 1060570 | ACGTTGGATGAAGCCTCTTCCCTGGAAATG | ACGTTGGATGGCACACCAAAGGGATTAACC |
| 2332891 | ACGTTGGATGGATCTGCATCCACATACATG | ACGTTGGATGTAACCGATACCTGGGCATGG |
| 2021736 | ACGTTGGATGCCCTAATAAATCAGAGCATCC | ACGTTGGATGTTATACAAGAGCAGTCCTGG |
| 7160830 | ACGTTGGATGTCAAGGGTGGTCCATTTGTG | ACGTTGGATGTGTCTTCTACGCTAGCATCC |
| 2526909 | ACGTTGGATGAAATGACCTCCCATCAGTGC | ACGTTGGATGCATTGGGAACAGTGCTCTTG |
| 7140963 | ACGTTGGATGTAGAAGCCTGGGTCTAGTTC | ACGTTGGATGGAAGTCCAGACCCATTGATC |
| 10143667 | ACGTTGGATGAATAGCACCTGTCCTTATGC | ACGTTGGATGGGAAGTATTTCTCTCCATGC |
| 2803981 | ACGTTGGATGGGGAGCTGCAATTCAAGATG | ACGTTGGATGCCTCATGACGTATGAGGATG |
| 768840 | ACGTTGGATGAAGATGTGCCTTTGCTCCTC | ACGTTGGATGTAATGGACTCACAGTTCCAC |
| 5809587 | ACGTTGGATGACTGTGCCACCCACTAACAT | ACGTTGGATGTCTAACCCGTTGTTGGAACC |
| 2023479 | ACGTTGGATGGCAGTGAATGATATCCGGTG | ACGTTGGATGGTGACTTTAGAGAGGGATGG |
| 4903045 | ACGTTGGATGGCTTTGGGCTTCGTAAATATC | ACGTTGGATGAAACACTTTGCAGCCATACC |
| 4903046 | ACGTTGGATGTCCATAAAACTACCGCCCAG | ACGTTGGATGCCTGCCAGTCATTCTTTCTG |
| 5809588 | ACGTTGGATGAGGGCCTGGTGTGCACAAAT | ACGTTGGATGTCCAGAAATGGAGCTGCTCA |
| 10220555 | ACGTTGGATGTGACTCTCAGCACCAACTTC | ACGTTGGATGAGACCTGAGGATTTGGAAGG |
| 2906132 | ACGTTGGATGGGCTTTAATTGGTGTGACAG | ACGTTGGATGATGGCATCTATCTCATAGGC |
| 11848482 | ACGTTGGATGATGTCACCCGGAAGTCATTC | ACGTTGGATGCCATATGCCTCATGGATCAC |
| 10129954 | ACGTTGGATGCACTCTCATGCTCTCAACAC | ACGTTGGATGCAGATGCAAAACACAGACCC |
| 2526921 | ACGTTGGATGAAAAGCTTGAGCCTGAAGTG | ACGTVGGATGAGAGAGGGAGAAAATGTAGG |
| 4903047 | ACGTTGGATGAAATTCCATCGACTGGGTGG | ACGTTGGATGCCTTGATCTTGGACTTCCAG |
| 11846357 | ACGTTGGATGTTAAGGGACATCGGTAGGAC | ACGTTGGATGATGTCAGGACTTTGGAACCC |
| 10136385 | ACGTTGGATGAAGCCATTGCCCTAGGATTG | ACGTTGGATGTTAGGCCCAAAATGCGAGAG |
| 12588242 | ACGTTGGATGACTGGAAGATGGCAGATTGC | ACGTTGGATGTCTACATCCTTGACCCTGTG |
| 11621517 | ACGTTGGATGAATTTCCCTCTTAGGAGCTC | ACGTTGGATGCATCTGTTTGGAGTCTTATTG |
| 2526910 | ACGTTGGATGTTAGGACTACTGCATTAGGG | ACGTTGGATGTCCTTCTCATTCTCCAATGG |
| 2526941 | ACGTTGGATGAATCCACTGCCACTCCTGAT | ACGTTGGATGTGAGAGACTGAGGGAGAAAC |
| 2803944 | ACGTTGGATGCCAGAATCCTCACAAACACC | ACGTTGGATGCCCACTAGCAAAACTGGGTT |
| 12436770 | ACGTTGGATGTCTGGAACCTTCTTCGTGTG | ACGTTGGATGGCCAAGGGTTTAAAACCTCC |
| 10220279 | ACGTTGGATGCACATATGCACATGTGCACAC | ACGTTGGATGGCGTGTGTATACGTGTTGTG |
| 10220280 | ACGTTGGATGTGTAGCCTCATTATGAGCCG | ACGTTGGATGCACAACACGTATACACACGC |
| 11844112 | ACGTTGGATGTCCTTTATTCATGCCCTGGG | ACGTTGGATGAATGAGGCTACAGGAGAACC |
| 12432455 | ACGTTGGATGATAAAGAACACACCTGTGGC | ACGTTGGATGAGAAGGCAATATTACGAGGG |
| 8015338 | ACGTTGGATGCACACATTCGAAATGCCTGC | ACGTTGGATGCCCCTCTACAACAAAACCAC |
| 3832969 | ACGTTGGATGATGTGCTGTAGTGTGTTGGC | ACGTTGGATGATTGCTAAGCCTAGGGTTGG |
| 9671972 | ACGTTGGATGGGTGGATTTAGTGTTTCACTG | ACGTTGGATGGCAGGAATAAGAAGAACTAC |
| 9671975 | ACGTTGGATGGTTTAGAACGATGTATCTGGC | ACGTTGGATGAGATGCTGAAAGGGTAGTTG |
| 7159986 | ACGTTGGATGATAGTCACTGGGTCACCAAC | ACGTTGGATGAAGAGGGACTTTGACCCTTG |
| 11848220 | ACGTTGGATGATTCTCTCTTCCTCTCTCTC | ACGTTGGATGCCTGAGTCACATGGAATTAAG |
| 5016369 | ACGTTGGATGAATGGAGTTGTCCAGAACAG | ACGTTGGATGTCACTGTTGCTTAATCACAC |
| 1986423 | ACGTTGGATGATACAGAACCATTTTGTGGG | ACGTTGGATGAGCTTAATGTGGGTAGAAGG |
| 2332909 | ACGTTGGATGCAGAACCATTTTGTGGGAAG | ACGTTGGATGGAGCTTAATGTGGGTAGAAG |
| 8013337 | ACGTTGGATGTGCACAAGTCCTCATTGTTG | ACGTTGGATGGATTGTAGGGCAGAATATGG |
| 11445680 | ACGTTGGATGTGTATGCATCTCTCCCACTG | ACGTTGGATGTTGAGCACCTGCCACAAGTG |
| 4903048 | ACGTTGGATGACTTGAAGCACTTGGAGTGG | ACGTTGGATGAATGACACCACCAGTCACAG |
| 12434793 | ACGTTGGATGGCCAGTCAAAGCAGGATTTC | ACGTTGGATGGAGGAAGAGTGAAGACTTCC |
| 2332910 | ACGTTGGATGATTGGGAAGTGGGCAAACAC | ACGTTGGATGTTGCCTTCTCTTTCTCCTTC |
| 4410017 | ACGTTGGATGTTGCTCTCGGCAAGAAGGAG | ACGTTGGATGTGTATAGCACAGTGCCCAGG |
| 4577019 | ACGTTGGATGTTGCTCTCGGCAAGAAGGAG | ACGTTGGATGTGTATAGCACAGTGCCCAGG |
| 2332911 | ACGTTGGATGTACTTCCAAAAGCCACCTGC | ACGTTGGATGAAAAGCCTGGCCAGTTGAAG |
| 4996747 | ACGTTGGATGTACTTCCAAAAGCCACCTGC | ACGTTGGATGAAGCCTGGCCAGTTGAAGTG |
| 10140820 | ACGTTGGATGTTCCTATCACAGTTGAGGAG | ACGTTGGATGAGTCCTTTGCATTCTAGCAC |
| 12431623 | ACGTTGGATGGACAATCCTAGGGACATCTC | ACGTTGGATGTCATCAGGCTTCAGGCTTTC |
| 6574090 | ACGTTGGATGTTGCAGTAGGGTTTGTGCTC | ACGTTGGATGATCACTCGCATTACCACCTG |
| 8008750 | ACGTTGGATGTTGGGTACTGTGGCTCTAAG | ACGTTGGATGAGCATGTGGGTAGGGAGATT |
| 11627420 | ACGTTGGATGGTGAGCACTGAAGGAACAGG | ACGTTGGATGTGCACTCTCTGACACAGCAG |
| 10150185 | ACGTTGGATGCTAGTTCTAGATCCCTGAGG | ACGTTGGATGAAAGCACTGCCCCTGTAAAC |
| 10150218 | ACGTTGGATGGCACACAGAAGACGACTAAG | ACGTTGGATGGTTCCTGATGTATCACTGAG |
| 9646164 | ACGTTGGATGCCTGATGTATCACTGAGTGG | ACGTTGGATGGCACACAGAAGACGACTAAG |
| 6574091 | ACGTTGGATGAGCTTGAAGCGAAAAGCACG | ACGTTGGATGCAGGGAGAGTTAGATGACTC |
| 2332912 | ACGTTGGATGTACACACCCTAAGCACCTAC | ACGTTGGATGAAGGGAAGCAGTGTAGGAAG |
| 7155359 | ACGTTGGATGCAAGCAAACTCTCTATCACC | ACGTTGGATGTTGCTCCAAGCTTCCTTTGC |
| 2332913 | ACGTTGGATGAGCCACCCATTTTGCAAAGG | ACGTTGGATGATTTAACCCTTCCTGGAATG |
| 4544184 | ACGTTGGATGCCCCTTTCTGGGTTTATGTG | ACGTTGGATGTTGGAGCAAGAACACACAGG |
| 4337224 | ACGTTGGATGATTCCCTTCCAGGTCTACAC | ACGTTGGATGTATGTCCGCTGCTCTTTGAG |
| 2332914 | ACGTTGGATGGTGCTGCCAAAAGGCATCAG | ACGTTGGATGGTAACGTCTCCACCCCAAAG |
| 4280167 | ACGTTGGATGTGACAGTAAGTATGGGCCGG | ACGTTGGATGAAGGAAGCACAGGGAAGAGG |
| 4903049 | ACGTTGGATGGGCTTCAGTCCTTTGGTTTG | ACGTTGGATGTTGCTCACCTGTATCACCTC |
| 3742837 | ACGTTGGATGAGTGAAGCTAGGAGGCTAAG | ACGTTGGATGAGCTGTACTGAAAAGCCCTC |
| 10139937 | ACGTTGGATGAGCCCTCCTCTACCAAATTC | ACGTTGGATGAGTGAAGCTAGGAGGCTAAG |
| 12434292 | ACGTTGGATGTGCTCCTTAGCCTCCTAGCT | ACGTTGGATGTACGTGCATCAGCTGGTCTG |
| 11620671 | ACGTTGGATGTCAGGACTGTCTGGCTCTTG | ACGTTGGATGTATCAGGAGCAAGGCCTGAC |
| 10140184 | ACGTTGGATGAGACAGTCCTGACATCCAGGC | ACGTTGGATGTACTGAGTAGGCCAAGCATG |
| 2332915 | ACGTTGGATGTCCTCAGCTTGTCTCTCTCC | ACGTTGGATGTCAACTCTGAGTAATGAGGG |
| 2332916 | ACGTTGGATGACATGCAAGGGACTCTTCCT | ACGTTGGATGAGGCCAAGTAGGATTCTGAG |
| 8012759 | ACGTTGGATGACTCAGAATCCTACTTGGCC | ACGTTGGATGAGGGTGTGAGTGGATGTAAG |
| 10149272 | ACGTTGGATGGATGTGTTGAGTGCTTCCTG | ACGTTGGATGGCTGTTGAGAGAGTTTGAGC |
| 11158973 | ACGTTGGATGTCCTTGAGGGCAAAAATGGC | ACGTTGGATGTGCAAAAGAGCTTTGCACGC |
| 4903050 | ACGTTGGATGAGAGGAATGAAGTAGGGTGG | ACGTTGGATGGTCTCCAGGCTCTGTTATAG |
| 10666445 | ACGTTGGATGAGGAAGAATGAAGGAGGGAG | ACGTTGGATGATGGCAGGGACTTAGCATTG |
| 2536143 | ACGTTGGATGAAGACCCTTGACTAGGACAG | ACGTTGGATGTGGGCCACACTGTTTGAGAA |
| 10638231 | ACGTTGGATGTGAGAACCACTGCTCTACAC | ACGTTGGATGATGACAGAGTGACTCCGTCT |
| 12431636 | ACGTTGGATGAGTGCAGTGGCTCAATCTCG | ACGTTGGATGCTGAGGCGGAGAATCACTTG |
| 8005904 | ACGTTGGATGCCAGGATGGTCTCAATCTCC | ACGTTGGATGACGGTGGCTCACACCTGTAAT |
| 11621058 | ACGTTGGATGTCCCAAGTAGCTGTAACCAG | ACGTTGGATGCAACATGGTGAGAACTCATC |
| 10133224 | ACGTTGGATGAGGGCTAAGGTAGGGATTAC | ACGTTGGATGAGTGGTAGAGCTGGAATTTG |
| 12433185 | ACGTTGGATGTGCACTCACAGCCTCAGTTC | ACGTTGGATGGAGGCCCCCATCTCTAAAAC |
| 740974 | ACGTTGGATGTGAAGAGGACCATTTCCCAC | ACGTTGGATGAAAGAGCTGTGCATGTCCAG |
| 740973 | ACGTTGGATGAAAGAGCTGTGCATGTCCAG | ACGTTGGATGAGGACCATTTCCCACACTTG |
| 740972 | ACGTTGGATGAAGGAGACTTTCGAGCTTGG | ACGTTGGATGAAGGAAAGCAAGTGGGTCTG |
| 740971 | ACGTTGGATGTTTGGGAGTTCACCAAAGGC | ACGTTGGATGAAACTGGCCTAGACCCATTC |
| 4243642 | ACGTTGGATGTACAGAAGAGGTATGCTGTG | ACGTTGGATGTAGTCCCTTATCATTTCCCC |
| 4415952 | ACGTTGGATGGCCTGGGAACTTGCTTCTAA | ACGTTGGATGAGGACCCCACTCAGAAATTC |
| 2215589 | ACGTTGGATGTAAGTGCTTATCCGTGGGAG | ACGTTGGATGCTGGAAAATGGACTCTCAGG |
| 4343211 | ACGTTGGATGAAGGGCATGTGACAATAACC | ACGTTGGATGCTGAGAGTCCATTTTCCAGG |
| 2536142 | ACGTTGGATGTTTTTCCCCTCTGCCCTTCC | ACGTTGGATGTCTGGAGGCTTGAGACCATC |
| 11293340 | ACGTTGGATGCTACCCCGGCAAACTTCTTT | ACGTTGGATGACCCGTACATTGTGCACATG |
| 10151620 | ACGTTGGATGTCTGAACTCTTCCAGGCTAC | ACGTTGGATGGGCCATGGTCTTACATGGAG |
| 2286840 | ACGTTGGATGAACTCCAGACAGCATTTCAG | ACGTTGGATGAGGGAAAAACCATCAGAGAG |
| 8023089 | ACGTTGGATGAAGAGACTATGCTGGTAGGG | ACGTTGGATGATTTCTGAGGTGGCCCTTTG |
| 8008009 | ACGTTGGATGATCTGGAGCACTCAAAACTG | ACGTTGGATGCCAGTCACATTGCAACATAG |
| 11419089 | ACGTTGGATGAAAGTGAGTCCCTGTCTCAG | ACGTTGGATGACAATGGGAGTAGGAAAAGA |
| 10694676 | ACGTTGGATGAAAGTGAGTCCCTGTCTCAG | ACGTTGGATGACAATGGGAGTAGGAAAAGA |
| 2536141 | ACGTTGGATGTGAGGTGGGAGGATCGCTTA | ACGTTGGATGACAGGGACTCACTTTATTGC |
| 765247 | ACGTTGGATGGAAGAGATGATGACTTGCCC | ACGTTGGATGATGCAGATGAGCTACCACAC |
| 7147626 | ACGTTGGATGTTTGCAGCTTGCCTAGCATG | ACGTTGGATGCTTCATCCTTCAGTTTCCCC |
| 10132629 | ACGTTGGATGTTTGCAGCTTGCCTAGCATG | ACGTTGGATGCTTCATCCTTCAGTTTCCCC |
| 4903051 | ACGTTGGATGGTCTAGGAAAGGGAGAACAG | ACGTTGGATGAAAACTCCCTCCTAACACCC |
| 11158974 | ACGTTGGATGTTTGTAGTTGGACACCCCAC | ACGTTGGATGAGCTTGTTTCAGACCTCAGG |
| 1035021 | ACGTTGGATGCATGGAGAGGAGATTGGATG | ACGTTGGATGATCTCTGGCCTGGAATACTG |
| 6574093 | ACGTTGGATGACATACCCAGAGCATCAAGG | ACGTTGGATGCAAGGTCTGTCATCTCTGTG |
| 4899439 | ACGTTGGATGAGAATCTCCTTCTGTTCCTC | ACGTTGGATGATGAAGAAGGTGAGGGTGAG |
| 7155287 | ACGTTGGATGAGTGTACATCCGGGGAAATG | ACGTTGGATGGAATCTCCTTCTGTTCCTCC |
| 7154402 | ACGTTGGATGGCCATGAAAAGACATGAAGG | ACGTTGGATGCCAGGATGTCATATACTTGG |
| 7154781 | ACGTTGGATGGTTCAAAGTCTGCATGACGG | ACGTTGGATGGTGGACAGATGCCATTACAC |
| 6574094 | ACGTTGGATGATGGTGACAGGAACACTCTG | ACGTTGGATGAGAAGAAGGTGGATGCCAGG |
| 10132242 | ACGTTGGATGTTGTCCGATGTCATGGCTGG | ACGTTGGATGAGCTGAGCCAGAGCAGAAAG |
| 10146959 | ACGTTGGATGTGAACTAGCTTTTCATGGAG | ACGTTGGATGTATCCCAGCTCTTGTCTGTC |
| 10147466 | ACGTTGGATGGGTGATAAAGTAAGACCCTG | ACGTTGGATGTGACAGAGGGTTGGTGTGTT |
| 11626411 | ACGTTGGATGTTGTTTCTTCCCTTGGTTCC | ACGTTGGATGAAGAACCTGGAGATAGCACC |
| 4899440 | ACGTTGGATGTACCTGCACTTTCCACTTCC | ACGTTGGATGTTTAATGGATGCCCGCTTGC |
| 10144553 | ACGTTGGATGGTCTCTTTGGACTGTAAGCC | ACGTTGGATGTAGGGACATAGGAGGTGAAC |
| 11627663 | ACGTTGGATGTCAGCTGCATTCTCATCCTG | ACGTTGGATGTTTTGTAGATGCGTCACCCG |
| 11627799 | ACGTTGGATGTGGTCCTTCCTTGAAAAGTC | ACGTTGGATGTCCTCAGTTAAAGATCTGCC |
| 11851733 | ACGTTGGATGTCTGAAGGCAGAACCTATGG | ACGTTGGATGGGTCACAGAGACATGTAGTG |
| 10140317 | ACGTTGGATGCCAGACTTTGAAGACAATGC | ACGTTGGATGAAGGAAGAAAGTCAGGTGTC |
| 8007375 | ACGTTGGATGCCCTTGCACAATGTATGTCC | ACGTTGGATGATCCTATATCCAGATGGGCC |
| 4899441 | ACGTTGGATGAATTAGAAGTAGAGGCAGAG | ACGTTGGATGGGATATAAACCCATGGATCG |
| 11158975 | ACGTTGGATGAAGCCATTGCTCTTTGCTGG | ACGTTGGATGAACCTCCGAGACAAACAAGG |
| 11419607 | ACGTTGGATGAAGCCATTGCTCTTTGCTGG | ACGTTGGATGAACCTCCGAGACAAACAAGG |
| 2109793 | ACGTTGGATGGCATGATCTTGGCTCACTGC | ACGTTGGATGTAGTCCCAGTGACTCGAGAG |
| 8023156 | ACGTTGGATGCAAGGAGAGGGAAACTGTAG | ACGTTGGATGTATGAAGTGTCTGGCACAGG |
| 10140579 | ACGTTGGATGAAGCAGGGTATCTTCCACTG | ACGTTGGATGTGGCCATTGCTCCTGGAGCTT |
| 7148199 | ACGTTGGATGTGGGTCTCTGCAACACAGTT | ACGTTGGATGATGGCACACACTTTTCCAGC |
| 7146916 | ACGTTGGATGATTCTACCTCCACACTGCAC | ACGTTGGATGGAGCTGTCTGCAGCAAATTC |
| 1990439 | ACGTTGGATGAGAGCTGAAGTCACACAGAC | ACGTTGGATGTATTACGTGCTGGAAGGGAC |
| 6574095 | ACGTTGGATGTGACCTGGTTTCCTGACACA | ACGTTGGATGTTTCAGCAACGAAGTCCAGG |
| 10140037 | ACGTTGGATGAAAAGACAGGCATCCTCAGG | ACGTTGGATGGGCTGAGTTATGTTGGAAAG |
| 8007249 | ACGTTGGATGTAGGTCAAAGAGCATGTGTG | ACGTTGGATGGGAGAGGCTCTTTTTTACAC |
| 1990438 | ACGTTGGATGCCTCTTTGGGTAAACAGACC | ACGTTGGATGTGGGAAATGACAAGCATCTG |
| 1990437 | ACGTTGGATGCCCTAGGTTCTTCCTTTCCC | ACGTTGGATGTGAGTTCACAGCCTGCTTTG |
| 10146484 | ACGTTGGATGATGGGCTCCTCAGATACATG | ACGTTGGATGGCCCATTTTAGAGGTGAGAG |
| 11627333 | ACGTTGGATGGAGCCCATTTTAGAGGTGAG | ACGTTGGATGTCCTCAGATACATGAGCAGC |
| 7155802 | ACGTTGGATGAGGAAGGACAGATTAGCTGG | ACGTTGGATGATTAACCAGAGTGTCCCATC |
| 2109792 | ACGTTGGATGTATGTTGCCCAGCCTGGTTG | ACGTTGGATGATCCCAGCATTTTGGGAGGC |
| 11429363 | ACGTTGGATGGCCAAACCATATCACCTAGC | ACGTTGGATGAACCAGGCTGGGCAACATAG |
| 8004210 | ACGTTGGATGTTCTGTTATGTGCAGCCTAG | ACGTTGGATGTCTATGTTGGCCCCTTTCAG |
| 2098194 | ACGTTGGATGTTCTGAAATCTAGGCAGAGG | ACGTTGGATGCTCAAGCCTTGACAAATTCC |
| 2109791 | ACGTTGGATGTTCTGGGATCTGGAAGATGG | ACGTTGGATGAGTGTGAAAGGGAAATGTCG |
| 11381729 | ACGTTGGATGTAGTGAGGGCTACATGTCTC | ACGTTGGATGGACAGAGTGAGACCCTGTTT |
| 1160094 | ACGTTGGATGCAGAGAATCTAGGTTGCCTG | ACGTTGGATGGAGAAGAAGCCTGGCTAAAG |
| 11628051 | ACGTTGGATGAGGTAATCAGTGGTAGCAGG | ACGTTGGATGGAGGAGGGAAAGTCAGATAG |
| 10136771 | ACGTTGGATGAAGCACTCCTTCCACCTTGG | ACGTTGGATGTAGTGAGACCCTGTCTCTAC |
| 10139903 | ACGTTGGATGATTGCAGACTGTCAAGCCTG | ACGTTGGATGAGAGCAGAGTCAGCCTAAGG |
| 4903053 | ACGTTGGATGATTGCACAACTGCACTCCAG | ACGTTGGATGGGAATTGGTGGCGTTATGTC |
| 3742836 | ACGTTGGATGAGCCGCAGTTTTGGATCTTC | ACGTTGGATGCCAGCTGTATACATACCCTG |
| 3742835 | ACGTTGGATGAAAGATTAAAGGCTCCAGGC | ACGTTGGATGTTCAGCTTCCTCTCCTTGTG |
| 8003233 | ACGTTGGATGAAAAATAGGCAGGAGGCCAG | ACGTTGGATGTGACAGTGATGCTGTTGGTG |
| 11621588 | ACGTTGGATGACCCCCCATAATAAACCAGC | ACGTTGGATGGGGCTTCTGACAAGAACAAG |
| 740981 | ACGTTGGATGGGAGGCAGATAACTCAAAGC | ACGTTGGATGTTCCCCACCTCCATCTACCA |
| 8019492 | ACGTTGGATGTCCAGCCTATATGACAGAGC | ACGTTGGATGCTCTTTCCCTCTCCCTTTCT |
| 8019644 | ACGTTGGATGCTCTTTCCCTCTCCCTTTCT | ACGTTGGATGTGACAGAGCAAGATTCTGTG |
| 8019646 | ACGTTGGATGCTCTTTCCCTCTCCCTTTCT | ACGTTGGATGTGACAGAGCAAGATTCTGTG |
| 8019653 | ACGTTGGATGTGACAGAGCAAGATTCTGTG | ACGTTGGATGCTCTTTCCCTCTCCCTTTCT |
| 11450794 | ACGTTGGATGTGACAGAGCAAGATTCTGTG | ACGTTGGATGCTCTTTCCCTCTCCCTTTCT |
| 11348193 | ACGTTGGATGCTCTTTCCCTCTCCCTTTCT | ACGTTGGATGTGACAGAGCAAGATTCTGTG |
| 11450793 | ACGTTGGATGCTCTTTCCCTCTCCCTTTCT | ACGTTGGATGTGACAGAGCAAGATTCTGTG |
| 11282735 | ACGTTGGATGCTCTTTCCCTCTCCCTTTCT | ACGTTGGATGTGACAGAGCAAGATTCTGTG |
| 2191823 | ACGTTGGATGGGCACCCAACCCAAAATTAC | ACGTTGGATGCAGTTTCAGTTCTGGGTTGG |
| 12232220 | ACGTTGGATGCAGCATCAGAAATGGTCTAG | ACGTTGGATGCCAAATTGTTGGGATTACAGG |
| 11158976 | ACGTTGGATGCCATCTGCAAGAAAATAAAC | ACGTTGGATGGGTTTCACATTTAGGTCTATG |
| 4903054 | ACGTTGGATGGCTGTTTCAGATACATGTCC | ACGTTGGATGGCGACATTCCGCCTCAAAAA |
| 11846755 | ACGTTGGATGTGTGAGATATCGTCAGATTC | ACGTTGGATGTCAGAAGCACAGCTGACAAC |
| 12431988 | ACGTTGGATGGGTCTCCTTTCAAGCTATGC | ACGTTGGATGGGATGTCAACAGAAGCCAAG |
| 12100526 | ACGTTGGATGGCTTTGACTGAATCTTGGAG | ACGTTGGATGATAGCTTGAAAGGAGACCTG |
| 11622568 | ACGTTGGATGTCAGCTTCTTCAACCTGTGG | ACGTTGGATGAGAGGGTTGAACTGAAGAAG |
| 9671230 | ACGTTGGATGAGCTGATTTCAGTCCTGGAG | ACGTTGGATGCTTCTTGCCATCCTAATATT |
| 12147487 | ACGTTGGATGACCCCAGTAGTTTCTGATGG | ACGTTGGATGAATAGCTGATTTCAGTCCTG |
| 4903055 | ACGTTGGATGAAGCGATTCTCCTGCCTCAG | ACGTTGGATGTGGTGAAACCCCATCTCTGC |
| 12147515 | ACGTTGGATGTGGAGTGCAGTGGCATGATC | ACGTTGGATGTGAGGCAGGAGAATCGCTTG |
| 11625092 | ACGTTGGATGATCCTGAATGGCCAGAGATG | ACGTTGGATGATACCACCAGGAACTCACAG |
| 4899442 | ACGTTGGATGCTACCACTCAGGAGTTGTTC | ACGTTGGATGATTTGGTTGCGTTCCCATGG |
| 2052146 | ACGTTGGATGTTATTTGAGCTCTGATAGTG | ACGTTGGATGCCACAAAAGCACGTGATTTC |
| 10220553 | ACGTTGGATGATTTTTCTGGCTCTGCCTGG | ACGTTGGATGTGTTGAAGCAGGGCTACATG |
| 10220565 | ACGTTGGATGACAAAAACTAGCTGGGTGTG | ACGTTGGATGCCGGGTTCAAGTGATTCTCA |
| 2332917 | ACGTTGGATGACCCCAGTAAGAGGCTTGAA | ACGTTGGATGGCACAGGTTAATAAATGCCTC |
| 7158910 | ACGTTGGATGCCTACTTCTTCTTCCCACAC | ACGTTGGATGGCCAGGTAAATTCAAGCCTC |
| 8015749 | ACGTTGGATGGACTGGCTTATTTGACTTAGC | ACGTTGGATGGGAAGGAAATTCTGACATATG |
| 8006812 | ACGTTGGATGACATGACATTCAACAGCCCC | ACGTTGGATGTTCCGAATCTCTGCCAACAC |
| 8008338 | ACGTTGGATGTTAAACAGACCAGGTGTTGG | ACGTTGGATGATCAGGGAGGATGAAATCTC |
| 2052145 | ACGTTGGATGGGCTTCTCAATTCAGATGGG | ACGTTGGATGGTGCTGGCTGCCTAGTTCTA |
| 2052144 | ACGTTGGATGGGGTTGCTGGAAATCTCATG | ACGTTGGATGGGTACTTCTGTGATCCCATC |
| 10146692 | ACGTTGGATGTAAGCAGAGCTGAAGAGAAG | ACGTTGGATGGAGACAGCAGGAAAACTTGG |
| 11627305 | ACGTTGGATGAAGTTTTCCTGCTGTCTCAC | ACGTTGGATGGCAGGAAGTTAGCATATTGG |
| 2079989 | ACGTTGGATGATCATGGCAGAAGGCAAAGG | ACGTTGGATGAAAAGTGTATGGTGCCTCCC |
| 8018881 | ACGTTGGATGAGAATGGCCTAATCCAGGAG | ACGTTGGATGTGTCTCTGCCTTATATGGGC |
| 4561387 | ACGTTGGATGCCCTCATGGAGTTTATAGTC | ACGTTGGATGCCCCTTTCCTTCCACATTTT |
| 11622025 | ACGTTGGATGAGCAAGTACTGCACTTTGGG | ACGTTGGATGTAAGCTAGAACCTCTGGCAC |
| 740980 | ACGTTGGATGATGCCTGCCACATTGGGTAA | ACGTTGGATGGGTAGGGCTGTCTGTTTCAT |
| 12433250 | ACGTTGGATGTGCAGGGTAGCATGAATTTG | ACGTTGGATGTATCCTCCAAGTTCAAATCC |
| 5809590 | ACGTTGGATGATAGGTCTGATGTCAGCAGC | ACGTTGGATGGTGCCACAGAACTGACATTC |
| 758915 | ACGTTGGATGCAATGCTGCTGACATCAGAC | ACGTTGGATGCAAGAAGGGCATTTCTACCC |
| 758914 | ACGTTGGATGTGTGATCCAGACATCAGCTC | ACGTTGGATGCCCTTGTTTTAGAGGTTGGG |
| 7154229 | ACGTTGGATGCCCACAGAAACAAAACCAGC | ACGTTGGATGAGCCACCATGTTTGAATGGC |
| 12437188 | ACGTTGGATGCGGACATAACTTTCCCAAGG | ACGTTGGATGGTGGCTCTGACCTTCAAAAC |
| 7159108 | ACGTTGGATGCACATCTCGAGGTTGAAGTC | ACGTTGGATGACTGGAAGGAATCACACTGC |
| 4903058 | ACGTTGGATGCCCTAGATAAAGCAGGCTTC | ACGTTGGATGTAAATCTCTCCTCTGGAGGC |
| 4899443 | ACGTTGGATGATTGCAGTGGTGCAGTGGAG | ACGTTGGATGTAGTCCCAGCTACTCTGGAG |
| 11848907 | ACGTTGGATGAAGACAGAGGTTGCAGTGAG | ACGTTGGATGTGCCATGGCCTGATTTCCAC |
| 12432148 | ACGTTGGATGGAAGACATTGGAGGTGTTAG | ACGTTGGATGAGCGAGACTCCATCTCAAAG |
| 12435078 | ACGTTGGATGCTAAGGGTATCTCACCTCAG | ACGTTGGATGCAAGAAGATCTGGGAGAAGC |
| 6574096 | ACGTTGGATGTGGCACATAGGAAATGCTCG | ACGTTGGATGTTCAAGCTGTCAGTTGCAGG |
| 11158977 | ACGTTGGATGTAGAAGGCTGGAAGTCAGTG | ACGTTGGATGTGTTGTGTTGGGCAGAAAGG |
| 11629434 | ACGTTGGATGTCAGGACCACAAATCCCATG | ACGTTGGATGATGGGAACTGAAGGTCATCC |
| 4378563 | ACGTTGGATGTTATGGCTTCCTCTCCCTAC | ACGTTGGATGCGTGTGCATATCCTGATCAC |
| 2098195 | ACGTTGGATGCAAAGTTCTCTGCCTGAGTG | ACGTTGGATGGCTCCAGTCTCTAATCACAC |
| 4633653 | ACGTTGGATGAACTGCCTGGCCATGCTAAG | ACGTTGGATGTTACCAAGTGCATGCCCGTC |
| 7148350 | ACGTTGGATGACCCCTTTGTTGGCCTTTAC | ACGTTGGATGCTTTCTTTGCCTCTCCAGTC |
| 740979 | ACGTTGGATGAAGGGCCAAGCAATGCTTTG | ACGTTGGATGATCCTAACCAGGTCTGATGG |
| 740978 | ACGTTGGATGCTTCACATCCCTCCTCAAAG | ACGTTGGATGTAGCCACGCCATTATTGGAG |
| 740977 | ACGTTGGATGCAGCAACCCAAAGCAACACG | ACGTTGGATGTCCAGTGAGGCCTCCCTCCAA |
| 740976 | ACGTTGGATGATCAGGACTACCTGAGCAAC | ACGTTGGATGTCCTGTTTCTAAGCAGGGAG |
| 4903059 | ACGTTGGATGGGTGGTCTTGTTTCAGAGTC | ACGTTGGATGCGAATCAGTCAGCAAACCTC |
| 4903060 | ACGTTGGATGAGAATCTGGAGGGACCAATG | ACGTTGGATGAATGTCCCCAGCCTTACTTC |
| 11852056 | ACGTTGGATGAATGTCCCCAGCCTTACTTC | ACGTTGGATGAGAATCTGGAGGGACCAATG |
| 9635257 | ACGTTGGATGTGAGTGCTACATGGCCTCTG | ACGTTGGATGTTGGAGACAGAGAACAAACC |
| 9635258 | ACGTTGGATGTTCTTTGCTGCCAGGGTTTG | ACGTTGGATGGCAAACCTTCAAGCCAGCAA |
| 9635259 | ACGTTGGATGTCCTGGTGCCTCAAACAAAG | ACGTTGGATGACCTGCCACATAGTAGTTGC |
| 4899444 | ACGTTGGATGCCAGTTCATCCACTTAGTAG | ACGTTGGATGCTGGGTTGCCATTTGCATAC |
| 12435382 | ACGTTGGATGTCTGTCAATGTCTCTCTCTC | ACGTTGGATGAACATCCATCCTGAATCACC |
| 12435412 | ACGTTGGATGTATTAGGCTCCCACATCTGG | ACGTTGGATGCCCTTGCATAGATGATGCTG |
| 11627381 | ACGTTGGATGTTTTTCTGGCACTGGTGGTG | ACGTTGGATGACCTCACTATGGGTGATCAG |
| 2052143 | ACGTTGGATGTGTGTCACTTCTACCTCCAC | ACGTTGGATGCCAGTGTAATCACAAGGGTC |
| 2052142 | ACGTTGGATGACTGGACTCACCCACATAAG | ACGTTGGATGGGTATGAGGGATTTTGCAGG |
| 2052141 | ACGTTGGATGATAGAAGCGTGACCTTACCC | ACGTTGGATGCCTGCAAAATCCCTCATACC |
| 8021035 | ACGTTGGATGATGTACAAACTGAGGCTAGG | ACGTTGGATGCTTCACCTGAGAGATTTCAG |
| 11158978 | ACGTTGGATGTTAGCCAGGCATAGTGGCAT | ACGTTGGATGTTATTGTAACCTCCGCCTCC |
| 11621216 | ACGTTGGATGAGCTTGCATTTACCACTCAC | ACGTTGGATGTAGAAAGTAGACCTCTTGGG |
| 10130873 | ACGTTGGATGGGCTTGGCATTTCTTGTCAC | ACGTTGGATGTAGAGAAAAGGAGGAAGGAG |
| 11621358 | ACGTTGGATGGGCTTGGCATTTCTTGTCAC | ACGTTGGATGTAGAGAAAAGGAGGAAGGAG |
| 758913 | ACGTTGGATGAGCAACCAGTCTAGTTTTCG | ACGTTGGATGCCTAGCCAACATCCTTTTCC |
| 11622602 | ACGTTGGATGCCTAGCCAACATCCTTTTCC | ACGTTGGATGGGATCTCTAAGCAACCAGTC |
| 10136931 | ACGTTGGATGTATTCTGTATCCCAGTAGCC | ACGTTGGATGCCATTTCCTATCTTGGTTTC |
| 740975 | ACGTTGGATGCTCAGTGCCAGAAATACCAG | ACGTTGGATGGAAACCAAGATAGGAAATGG |
| 747987 | ACGTTGGATGCCTTGTGAACTTCCAACCTG | ACGTTGGATGAGGTCTGGCACTGCTAAATG |
| 11623819 | ACGTTGGATGTCATCTTGGCAACTCCTTCC | ACGTTGGATGAGTAAGCCCTGATATGCCTG |
| 12434445 | ACGTTGGATGCTCTTAGTATGGAAAGGCAG | ACGTTGGATGTTGGCATCCTTTGTAAACAG |
| 8003375 | ACGTTGGATGTAAGGATGGTTCACTGTGGC | ACGTTGGATGAGCTGCCATCTGTAGCATTC |
| 10143596 | ACGTTGGATGTACCATCCCTTATTAGATGG | ACGTTGGATGACATCCATCTGTGCATCCAT |
| 12435321 | ACGTTGGATGTCCTATATTGTCAGATGGCC | ACGTTGGATGCCTACACACAAATAGGCATG |
| 12435401 | ACGTTGGATGGTATGGTTTTGGGTGTCTGG | ACGTTGGATGTAACCACTGTGGCTTGAGAG |
| 8010609 | ACGTTGGATGTCTTCTGTTTCTGTGGCTGC | ACGTTGGATGAAAAGCTGGCCCTAAAAGGC |
| 11158979 | ACGTTGGATGATGTCCAGACACCAAAACCC | ACGTTGGATGATCTACTTGGATCTGGGCAG |
| 11158980 | ACGTTGGATGAACCACACTGTGCACTCTTC | ACGTTGGATGGGGCATGAACGATATGCAGT |
| 11627524 | ACGTTGGATGCGACAGATCAGGAAAATAGC | ACGTTGGATGGTGTTCAGGACAGCATATCC |
| 1126160 | ACGTTGGATGTGTTCTCACCCTGTTCTGTT | ACGTTGGATGGGGTTCTCTCTTGACAGATG |
| 10136074 | ACGTTGGATGTTGTCCATGTGACCTCTATG | ACGTTGGATGGGGCCATGAAAACCTAGTTC |
| 4903061 | ACGTTGGATGCATAGAGCCCTCAAAGGTAG | ACGTTGGATGAGGAGTAGTGAGAAGGAATC |
| 10665398 | ACGTTGGATGGGGCTGCACCTTGTATTTAG | ACGTTGGATGTACTGTGTAAAACGAGGGAG |
| 6574097 | ACGTTGGATGGGGCTGCACCTTGTATTTAG | ACGTTGGATGTACTGTGTAAAACGAGGGAG |
| 9671654 | ACGTTGGATGTACTGTGTAAAACGAGGGAG | ACGTTGGATGGGGCTGCACCTTGTATTTAG |
| 10140024 | ACGTTGGATGCCTGCAGCTTCTAAAACTGC | ACGTTGGATGTCCCAAAGTGCTGGGATTAC |
| 10142421 | ACGTTGGATGTGATCTCAGATCACCGCAAC | ACGTTGGATGTGTAATCCCAGCTACTCAGG |
| 10142593 | ACGTTGGATGATCTGAGATCACGCCATTGC | ACGTTGGATGGGTTTGGGCTTCCATGCAGT |
| 11423372 | ACGTTGGATGCCCATCCTACTTTTCACACC | ACGTTGGATGAGTTGAGATTGTGCCACTGC |
| 5809592 | ACGTTGGATGCCCATCCTACTTTTCACACC | ACGTTGGATGTGCAGTGAGTTGAGATTGTG |
| 2332918 | ACGTTGGATGTAGGATGGGTGTTTCCTAGC | ACGTTGGATGAACCCATGGGACCACAATTC |
| 2332919 | ACGTTGGATGATGAAGGAAGAAGCCCTGAC | ACGTTGGATGTCTGAGGGCTCTCTCTAATG |
| 8007348 | ACGTTGGATGTGAAGGGAAAGGAGGCCAAG | ACGTTGGATGTCTTCTGGGATCCAGTCAGG |
| 1990443 | ACGTTGGATGTACATGATCCTCCCCTCTAC | ACGTTGGATGCACTGGATTTGGCAAGAAGG |
| 8007690 | ACGTTGGATGTCAGCTCTTAGCCATCCTTC | ACGTTGGATGGCCACTGGATTTGGCAAGAA |
| 3937455 | ACGTTGGATGACCTCCACACTCATTACCTC | ACGTTGGATGGCAAGAATAGGTTCTTTCGC |
| 8012823 | ACGTTGGATGTTGTCGGTCTCTTCTAAGTG | ACGTTGGATGGCACCGAGTAATATGGAGTC |
| 4899445 | ACGTTGGATGAAGGTGAGAGAAAACTCACC | ACGTTGGATGCAGGAGAGTCTGCCCATTTG |
| 4903062 | ACGTTGGATGATGTCTTACTTATGCCCTTG | ACGTTGGATGTCCTAAGAAATAGGTGCTTC |
| 973963 | ACGTTGGATGACAAACCACTAAACTTTCAG | ACGTTGGATGGATTTGTTCTGGCAGGAATG |
| 10149962 | ACGTTGGATGAAATGGAGTAAGGGTCAGGG | ACGTTGGATGGGGAGCTGGTGGTGAAAAAT |
| 8003449 | ACGTTGGATGTCCAGGCCAACATTTTCAGG | ACGTTGGATGTTTGTGCTACTGGAGGGAAG |
| 11620775 | ACGTTGGATGAAACCAGCTTGTTGCTTCCC | ACGTTGGATGAGAAGAAGCTGTTCAGACCC |
| 8009089 | ACGTTGGATGACACAGACAGACACTCCCAC | ACGTTGGATGACTTCTCACTCTTTCTGGTAA |
| 8008967 | ACGTTGGATGTGACCTGCCGACTTCTCACT | ACGTTGGATGTCCATCATCTAGGACCTTGG |
| 12050132 | ACGTTGGATGTGCAGGGTTCTGAAAGGAAG | ACGTTGGATGTTATGTGCAGGCATGATGGC |
| 10133018 | ACGTTGGATGGTGCTAAGTGCTTTCCATCC | ACGTTGGATGACTGCCCATCTGAGAAATGG |
| 1990442 | ACGTTGGATGCCATCCCTCCAACTCAGAAC | ACGTTGGATGTAGGTGTGCTCCCATTTAGC |
| 1990441 | ACGTTGGATGCACACCCTGGCATGAATGTG | ACGTTGGATGTCAGAGATATGCACTGCAAG |
| 8015833 | ACGTTGGATGTCAGAGATATGCACTGCAAG | ACGTTGGATGCACACCCTGGCATGAATGTG |
| 1990440 | ACGTTGGATGCCAGGGTGTGTTCTAATACG | ACGTTGGATGAAGTCACTAACCCCACACAC |
| 4903063 | ACGTTGGATGCCATCTCACATTGAGATGGG | ACGTTGGATGCCACCAACTCTCCAAAACTC |
| 10139810 | ACGTTGGATGGCTTACCTTTTTCCCATCCC | ACGTTGGATGCAATGCTGTTACCAGGAACC |
| 4903064 | ACGTTGGATGCTGCTCTGTGTCAGCAGAAA | ACGTTGGATGATGGAGGCTTTGTAGCTAGG |
| 2159715 | ACGTTGGATGTACAGGCACTGGCGAAGAAG | ACGTTGGATGCTGCCTGCAAGTTCCCATTG |
| 2109795 | ACGTTGGATGTCCTGACTCTCTCAAAACCC | ACGTTGGATGCAAACAAGGTCCCAGCATTC |
| 2159714 | ACGTTGGATGAAAGCCCCTCTAGCAAAAGG | ACGTTGGATGAAACTCTCTCGTTGCTGTGG |
| 11623107 | ACGTTGGATGTAAAGGTTAAGTGCCCTGCC | ACGTTGGATGAGTGAGAGATAGTGTTGCAG |
| 7152005 | ACGTTGGATGACTAGGCTCCCCTGCTCACTA | ACGTTGGATGACCAACTCTGTAAGAGCAGC |
| 7152489 | ACGTTGGATGATGAGATGATGGATGCTGGG | ACGTTGGATGTCCCACACTGATTATGGTGC |
| 4479167 | ACGTTGGATGGATTACAGGTGTCAGCAACC | ACGTTGGATGGCCAGAATTACCCTGATACC |
| 4606655 | ACGTTGGATGTTCCCGGTTAAGCAGTTCTC | ACGTTGGATGGTGAAACCCCGTCTCTACTA |
| 4606656 | ACGTTGGATGTCACTGCAACATCTGCCTTC | ACGTTGGATGTTAGCTGGTCATGATGGCAG |
| 4489943 | ACGTTGGATGAAGGCAGATGTTGCAGTGAG | ACGTTGGATGTTAGCTCTACGATCCATGTC |
| 7142642 | ACGTTGGATGCCTCCAGAACTGTAAGACAG | ACGTTGGATGAAACGCATGGTATCAGTTCC |
| 8006233 | ACGTTGGATGTTCCATATTTCCAGGGTGTG | ACGTTGGATGGACCTTGGGTAAGATATTGG |
| 8007559 | ACGTTGGATGGACCGTGGATAGTCATCTCC | ACGTTGGATGCACAGGCTTAGCTGCTGGTG |
| 8006156 | ACGTTGGATGTCTCCACCTTGTCTCAGAGC | ACGTTGGATGTGCCTGGCTCCACAGGCTTA |
| 1468662 | ACGTTGGATGTCATGTAGGTTGGCTCTGAC | ACGTTGGATGGCTAGAAATCACCAGCAACC |
| 11627048 | ACGTTGGATGACAAGCTGGAGAGCTTCACT | ACGTTGGATGAAAAGCACCACTCCAATCAC |
| 6574098 | ACGTTGGATGAACCTCTGACCTCAGGTGAT | ACGTTGGATGAATTGTGGTTAATGGCTGGG |
| 12433760 | ACGTTGGATGACTTTGGGAGGCCAAGGTG | ACGTTGGATGATGTTGGCCAGGCTGGTTTC |
| 12433780 | ACGTTGGATGTTGAGGTCACGGGTTTGAAA | ACGTTGGATGCCACCATGCCCAGCTAATTT |
| 12434506 | ACGTTGGATGAGCCTGGGAAACACAGAAAG | ACGTTGGATGACTGTAACCTCGAACTCGTG |
| 12434673 | ACGTTGGATGAGCAGGTGACATTACCAGTC | ACGTTGGATGGTCATTAGGGAAATGCCCAC |
| 12431400 | ACGTTGGATGAGCAGGTGACATTACCAGTC | ACGTTGGATGGTCATTAGGGAAATGCCCAC |
| 12431384 | ACGTTGGATGGGTTGCACCATTGCATATTC | ACGTTGGATGTAATGTCACCTGCTGGTGAG |
| 4903067 | ACGTTGGATGCTGCATTGGTATCAGGACTG | ACGTTGGATGCTAGCTTATTTCACTCGGCC |
| 2332920 | ACGTTGGATGTACATATCACCACACCTGGC | ACGTTGGATGTGAGCCCAGGAGTTCAAGAC |
| 2215591 | ACGTTGGATGTCCCCAGTTTGCATCTTGAC | ACGTTGGATGATTTGTTAAAATTCATAGAAC |
| 12433064 | ACGTTGGATGTGACTTGAGACCAGGAGTTC | ACGTTGGATGACATATGTGCCACCACACTC |
| 12436263 | ACGTTGGATGAGTTCAAGACCAGCCTGGAC | ACGTTGGATGATATGTGCCACCACACTCGG |
| 12433097 | ACGTTGGATGTGATCACAGCTCACTGCAAC | ACGTTGGATGTGTGGTGGCACATATGTTTG |
| 12433184 | ACGTTGGATGTCCCAAGTAGTGTGCATGCC | ACGTTGGATGTGTGATCACGCCACTGTACT |
| 8015900 | ACGTTGGATGTGGAGTGCAGTAGTGTGACC | ACGTTGGATGACACTACTTGGGAGGCTGAG |
| 11296981 | ACGTTGGATGGAGTGAGATGTGTAGATGAC | ACGTTGGATGGCCTAATTTCACCTCTCTTG |
| 11344025 | ACGTTGGATGGAGTGAGATGTGTAGATGAC | ACGTTGGATGGCCTAATTTCACCTCTCTTG |
| 11464204 | ACGTTGGATGTAACATGGCGAGAGCTCATC | ACGTTGGATGAGCTAGGACTACAGGTACAC |
| 11441172 | ACGTTGGATGTACAGGTACACACGACAGTG | ACGTTGGATGACTAGACTGAGTAACATGGC |
| 11381807 | ACGTTGGATGACTAGACTGAGTAACATGGC | ACGTTGGATGTACAGGTACACACGACAGTG |
| 10873251 | ACGTTGGATGATCTCAGGTGATCCACCCAC | ACGTTGGATGTGGGCGCAGTGGCTTGTAAT |
| 2109794 | ACGTTGGATGGCATCTGTTAAAAACAGGCC | ACGTTGGATGACTCCTGATCTCAGGTGATC |
| 10873252 | ACGTTGGATGACTGGCTTCCAGGTTCAAGT | ACGTTGGATGTGGTGAAACCCCATCTCTAC |
| 4520784 | ACGTTGGATGAATCTTGGCTCACCACAACC | ACGTTGGATGATGCCTGTAATCCCAGCTAC |
| 2877820 | ACGTTGGATGTAGTAGCATTCCAAGTGCCC | ACGTTGGATGATAATCTATGTCCTAGATTG |
| 2877821 | ACGTTGGATGTAGTAGCATTCCAAGTGCCC | ACGTTGGATGATAATCTATGTCCTAGATTG |
| 4569195 | ACGTTGGATGGGAATGCTACTATTTGAAGGG | ACGTTGGATGTCTGTATCTTTCTGGTGATG |
| 11628905 | ACGTTGGATGAGTTACATTCCAGGGAGTGG | ACGTTGGATGCCAAGACATTTCTGCACTCG |
| 2191822 | ACGTTGGATGTGCAAAGTGGTGGAGGAAAG | ACGTTGGATGATTTTTCCCGGCATCTGACC |
| 2191821 | ACGTTGGATGTGAGATGGATCTGGAGCCAC | ACGTTGGATGGAAAGTGTCCTTAGCTTGCC |
| 11464689 | ACGTTGGATGTCGCTTCAACAAGTTGCTTG | ACGTTGGATGAGAGTGAGACTCTGTCTCAA |
| 12431959 | ACGTTGGATGACTTTGGGAGGCTGAAGTAG | ACGTTGGATGCATCACCCCTGGCTAATTTT |
| 4903068 | ACGTTGGATGATGTGAGTGCCTAATACCTG | ACGTTGGATGGCCCTGAATTGATACTGAAC |
| 1544579 | ACGTTGGATGCCTTATCTCTCTAAGACATGC | ACGTTGGATGACCATTATCATCTTCCCAGG |
| 7155879 | ACGTTGGATGCCTTGATGCATCATCTCTCC | ACGTTGGATGTTGCCTCTATCCTGATCTGG |
| 12433603 | ACGTTGGATGTTGCCTCTATCCTGATCTGG | ACGTTGGATGCCTTGATGCATCATCTCTCC |
| 11351432 | ACGTTGGATGCAAGAGCGAAACTCCATCTC | ACGTTGGATGGTGGTTTGCAGAGGCTATTG |
| 11448438 | ACGTTGGATGCAATAGCCTCTGCAAACCAC | ACGTTGGATGCGGAACATGGCACATGAAAG |
| 4243643 | ACGTTGGATGAAAGCTCTTGGGCTCAAGTG | ACGTTGGATGAATACAGTGTGTGCCAGCTG |
| 4140952 | ACGTTGGATGCTCATGTTCATGCTACAAGC | ACGTTGGATGAACAAATGGAGAAAGGAGGG |
| 8005372 | ACGTTGGATGCTCAACAAACAGTGGTTGAG | ACGTTGGATGTTCTGCTATGTTGCATGACC |
| 8004109 | ACGTTGGATGGGCAGGATCTGCTGTTTTTC | ACGTTGGATGGGTTGAGTACCTGCTATGTG |
| 8008398 | ACGTTGGATGCCCATAGCTCTATGAACCTG | ACGTTGGATGATGTGCTAAGCACCATGCTG |
| 8009692 | ACGTTGGATGTCTTCTCCTCTAGAAGATGC | ACGTTGGATGAAACAGCAGATCCTGCCTTC |
| 2332921 | ACGTTGGATGACAGGTTCATAGAGCTATGG | ACGTTGGATGCTTGTCTCAATCTTCTCCTC |
| 12050320 | ACGTTGGATGTGGGCCAGCAATCTATGCAC | ACGTTGGATGTTTGCCCTTCATTGCTCCTC |
| 12050323 | ACGTTGGATGAAGGGCAAAGGCTGAGAAAG | ACGTTGGATGTAAAGTCCAAACTCCTTGGC |
| 8010316 | ACGTTGGATGCCTCATTCACATTGATCAGC | ACGTTGGATGCCATAGGACAAAAAGTGCAC |
| 7154293 | ACGTTGGATGCGGATCACTTGAGATCAGGA | ACGTTGGATGTGCTACCACACCCAGCTAAC |
| 12147969 | ACGTTGGATGTCTCCAATCCTGCTCATGGG | ACGTTGGATGTTGATACGGCTTCCACAGTG |
| 2215590 | ACGTTGGATGATGAGAGCCTTTCTTCAGGG | ACGTTGGATGTCCAAGAAGGACAGCAGTAG |
| 4265749 | ACGTTGGATGGGGAAGGAACTTGTTCAGGA | ACGTTGGATGGCCAAAACTGAAGCCTTGAG |
| 1004552 | ACGTTGGATGGCAAAACCCAGTGCCAAAAC | ACGTTGGATGGATCATCCAAGTATGCTCCC |
| 4307892 | ACGTTGGATGGCAAGCCTTCTGAAAAGTTG | ACGTTGGATGAGGTAGGGAAAGAGGAAAAC |
| 12431973 | ACGTTGGATGAGCTACTCAGTAGGCTGAAG | ACGTTGGATGTCATAGCTCATTGCAGCCTC |
| 12431975 | ACGTTGGATGAGCTACTCAGTAGGCTGAAG | ACGTTGGATGCAGTAGTGCAATCATAGCTC |
| 767874 | ACGTTGGATGAAGGTGATAAAGTCCCCTGG | ACGTTGGATGGTCACACCATGTATCCTCTG |
| 11628597 | ACGTTGGATGAAAGCCACTTGTGTCTCCAG | ACGTTGGATGAGACCACATTCCCAGACATC |
| 10129371 | ACGTTGGATGGGTGTTCTGCAGATCATATC | ACGTTGGATGTTTATTATCCAGGGTTGCCC |
| 4903069 | ACGTTGGATGAATTGCTTGAACCTGGGAGG | ACGTTGGATGAAGGCAGAGTTTCCTTCTGT |
| 4903070 | ACGTTGGATGTTTCACCATGTTGGCCAGAC | ACGTTGGATGTAATCCCAGCACTTTGGGTG |
| 4903071 | ACGTTGGATGGCATGACAAAGTGTGGGATC | ACGTTGGATGCACCTGGCCAGAATCACTTT |
| 11622224 | ACGTTGGATGATGGCCAACTCCTTTCTTCT | ACGTTGGATGAAGATAAGCTGAGAGACCAG |
| 10459455 | ACGTTGGATGTGGCTCGATCTCGACTCATG | ACGTTGGATGGGTGGTGCACACCTGTAATC |
| 9323577 | ACGTTGGATGAGGTTGCCATGAGTCGAGAT | ACGTTGGATGTCCAGGGTGCTGTTTTTTGG |
| 10624648 | ACGTTGGATGTTCTGTTTTGCCCTCCCTTC | ACGTTGGATGTTATGAGGGAGCAGTGTGTG |
| 3058953 | ACGTTGGATGTTCTGTTTTGCCCTCCCTTC | ACGTTGGATGTTATGAGGGAGCAGTGTGTG |
| 11158981 | ACGTTGGATGAGTGAGACCCTGTCTCTAAG | ACGTTGGATGGGGTGCCAATTATCTGCTTG |
| 11158982 | ACGTTGGATGCCAAAAACTACCACATGCTC | ACGTTGGATGCATCGCTATATAGTGCTCTG |
| 11158983 | ACGTTGGATGATGCCCAGCTCACAATCATG | ACGTTGGATGTTGGGTGGTGAACATATGTG |
| 1860750 | ACGTTGGATGGTCCGCTGGATTGCTTTATC | ACGTTGGATGCAGTGTGAGACTCCATCTCA |
| 1860749 | ACGTTGGATGAACATGATTAAGGATAAAGC | ACGTTGGATGTCCCCGGAATGATACATGAC |
| 1860748 | ACGTTGGATGAAAGCAATCCAGCGGACAAG | ACGTTGGATGACTCGACTAGCTAGTCTTGG |
| 1860747 | ACGTTGGATGTTGGCATTGACAGAGGAGAG | ACGTTGGATGAAAGCAATCCAGCGGACAAG |
| 11419679 | ACGTTGGATGTACTGAGCCCAGTAGTAAGG | ACGTTGGATGCTCCCTGTGTACCTCATTTC |
| 8011777 | ACGTTGGATGTGGGCGACAGAGTGAGACTC | ACGTTGGATGCATGTTGGCCAGGCTAGTCT |
| 6574099 | ACGTTGGATGAGTAGAGACGAGGTTTCACC | ACGTTGGATGAGGTGGGCAGATCACAAGGT |
| 8010957 | ACGTTGGATGAAGTGCTGGGATTATGAGCC | ACGTTGGATGTGGGTGTGTCTCCAGTAAAG |
| 11626895 | ACGTTGGATGGGGAAGAATAAGAGCCCATC | ACGTTGGATGCCAGCCAGTAGCAGAGTTTT |
| 10151431 | ACGTTGGATGAAGTGCAATGGCGCGATCTC | ACGTTGGATGTACTTGGGAAGCTGAGGCAG |
| 4903072 | ACGTTGGATGTCTGCTTCTCTTCCTGTGTG | ACGTTGGATGAAGCACAAAACGTGGTCCAG |
| 4589489 | ACGTTGGATGAGGTGAAATGTGGACCACAC | ACGTTGGATGGGCAGTTCTCCTAGCTAAAG |
| 9671327 | ACGTTGGATGATTACAGGCATGAGCCACTG | ACGTTGGATGGGATTGCTTTCTGGTTGTGC |
| 4899446 | ACGTTGGATGGGATTGCTTTCTGGTTGTGC | ACGTTGGATGGCCTCCCAAATTGCTGAGAT |
| 10144501 | ACGTTGGATGAAGAATCGCTTGAACCCAGG | ACGTTGGATGATGGAGTTTCTCTCTGTCGC |
| 5809594 | ACGTTGGATGCATGAGCGAGTTCACATGGG | ACGTTGGATGTGGACCTAAATACTGGTGGG |
| 720317 | ACGTTGGATGTGGACCTAAATACTGGTGGG | ACGTTGGATGCATGAGCGAGTTCACATGGG |
| 8014316 | ACGTTGGATGGTTCATTTCCCGGCATTCTC | ACGTTGGATGGACCTGTGCTGAGAAACAAG |
| 11158984 | ACGTTGGATGGACATAGTTCTGACCTCACC | ACGTTGGATGTTATGAGGACCAGGTGCTAG |
| 6420906 | ACGTTGGATGCCCGAGGGATGAGTATTTTG | ACGTTGGATGTAGGAGGGCGATTACCCACA |
| 8004055 | ACGTTGGATGTTTTTCCTCCTCCCACAGAC | ACGTTGGATGGGCACCAGAGTTAAGACAAC |
| 12434800 | ACGTTGGATGCCACTATTTTTTCCCCACTC | ACGTTGGATGGCAGGCTAAAAACATTCCATG |
| 4243644 | ACGTTGGATGGGGAGTTCTCTCAATTTACC | ACGTTGGATGGGCAGAATAGTTGTTGGTAG |
| 4899447 | ACGTTGGATGCTATTCTGCCATAGCCTTGC | ACGTTGGATGTCTATGCCTCAGCAAGCATG |
| 4903073 | ACGTTGGATGTGTTCCCCAAAGCTAAGGAG | ACGTTGGATGCTATTCTGCCATAGCCTTGC |
| 11848634 | ACGTTGGATGTCACTGCTGCTCTTGACTAG | ACGTTGGATGGGACAGACAGAGAGAAAACC |
| 4899448 | ACGTTGGATGTCACTGCTGCTCTTGACTAG | ACGTTGGATGGGACAGACAGAGAGAAAACC |
| 10131564 | ACGTTGGATGTGGAGAGACCAAACTGAGAG | ACGTTGGATGCCCTGCTTAGTAAATAGGCG |
| 10134150 | ACGTTGGATGGCATGGTCTGTAGAAGAAGC | ACGTTGGATGAGACACATTCTGGGAAGGTC |
| 763388 | ACGTTGGATGTACAGGGATTGTGATGTGGG | ACGTTGGATGGGGTACTCTTAGCTGAGAAC |
| 11845938 | ACGTTGGATGATTGGCTTGAGGCATGAGTG | ACGTTGGATGAGTTTCCTGACATTCCCTGC |
| 11845946 | ACGTTGGATGTCCTCGGTAAGCAGTTGTTG | ACGTTGGATGCCACATCACAATCCCTGTAC |
| 11845915 | ACGTTGGATGCCACAGTCATTCAACACTTG | ACGTTGGATGGGAATGTCAGGAAACTTAGG |
| 10137463 | ACGTTGGATGATAGCCTGCGCAGGTGAAAA | ACGTTGGATGAGCCAACCCAAATCCAGAAG |
| 6574100 | ACGTTGGATGACACCAAGAGCTGGAGTGAT | ACGTTGGATGGTCTGTCAGGTCACTAATGG |
| 7140344 | ACGTTGGATGTGGCACCTAGTACATGCTAG | ACGTTGGATGCAGAGTGAGACTCCATCTCA |
| 10646889 | ACGTTGGATGAGAGTGGGTAAGTGCACAAG | ACGTTGGATGTGGGTGACAGAGTTAAGACT |
| 7146287 | ACGTTGGATGGGTGTCCCTTCAGGTCTAAA | ACGTTGGATGCCATGCAAATGTCCACACAG |
| 10605948 | ACGTTGGATGCTTCATTGGTTCTCTGCAGC | ACGTTGGATGCAACACGTGATTCCAGAAGG |
| 5809595 | ACGTTGGATGGTGGGCTTACACCATTTCTG | ACGTTGGATGATACCACCCAACTACCCATC |
| 1035099 | ACGTTGGATGTGGGGAGAACTTTGGTCAAC | ACGTTGGATGAAAGGGTACCCAGACTTCAC |
| 7159877 | ACGTTGGATGATCTTGGCTCACCACAAACC | ACGTTGGATGGCCTGTAATCTCAGCTACTC |
| 7142579 | ACGTTGGATGTACTACATGTCACAGTTCTG | ACGTTGGATGCGCTCACTCTGTGTATGTAT |
| 12431762 | ACGTTGGATGCAACTTAAGGAGAGCTAGGG | ACGTTGGATGTCCTCCACTGGATAACTTGC |
| 12431764 | ACGTTGGATGGGGTGAGAAACATACTCAAC | ACGTTGGATGGTATTGTATGTACTCACCGC |
| 10647999 | ACGTTGGATGGCTGTTTTTCCAAATTCTTTCC | ACGTTGGATGTCCAAATCACCTTTCTTAGC |
| 6574101 | ACGTTGGATGTAAGAATGGGAGCTCAGTGG | ACGTTGGATGACCTGGATGCAAACTGGTTG |
| 6574102 | ACGTTGGATGGATGTGACAACAAGAGAGGC | ACGTTGGATGACAGTCCTCACCATCACAAC |
| 1861162 | ACGTTGGATGACCCTCTTGCTTTCATTGGG | ACGTTGGATGCTCTATATAGGCATGTGGGC |
| 12432972 | ACGTTGGATGAAAACAAAGTCCCTGCCTTC | ACGTTGGATGTTCTGCCACAGCATTTACAC |
| 10146134 | ACGTTGGATGGCATTGCACAGTTCAGTTTC | ACGTTGGATGGTTGGCACTCAGTAATTAGC |
| 10146616 | ACGTTGGATGTGACTCAATCTCCCTCTCTC | ACGTTGGATGTTCAGGATGGAAGTGTGAGG |
| 10146769 | ACGTTGGATGACATCCAGGCAGTAGAATGG | ACGTTGGATGTGAGTGGATTCCCATGACTC |
| 8018936 | ACGTTGGATGGTCAATTCAGTGGCAAGGAC | ACGTTGGATGTAAGGAGCCCATCAATGCAG |
| 10483849 | ACGTTGGATGTGTAAGACCCTTGAGGTAGC | ACGTTGGATGGCCCACTGGTACTCATTTTC |
| 2160137 | ACGTTGGATGGAAGGAAGAAGGGCAAAGGG | ACGTTGGATGGTGATGGAGTTGGTGGGAG |
| 2192595 | ACGTTGGATGTGCAATTGAGGAGACTAGGG | ACGTTGGATGTCCCACCAACTCCATCACTT |
| 2192594 | ACGTTGGATGGGCCATGCAATCGGATTTTC | ACGTTGGATGTGTTGTTGCATATGCAGGGC |
| 11271695 | ACGTTGGATGAAGAAGTGCCTTTCACCTCC | ACGTTGGATGACATACCCAAGACTGGGAAG |
| 10747301 | ACGTTGGATGTGCCTTGCTGGATTTCAGAC | ACGTTGGATGGGTATGCAATTCCAAGTGGG |
| 12050363 | ACGTTGGATGTACCTCCACTTTGCAGGGTA | ACGTTGGATGTGGAAAAGCTGCAGAGACTC |
| 12050368 | ACGTTGGATGATGGTAGATCCACTAGCAGC | ACGTTGGATGCTGCGTACTTTCACAGTCTG |
| 12432949 | ACGTTGGATGAAACAAACAACCCCATCAAC | ACGTTGGATGTTCATGTGTCTTTTGGCTGC |
| 7401375 | ACGTTGGATGGAGATACCATCTCACACCAG | ACGTTGGATGTTTCTCCACATCCTCTCCAG |
| 8019682 | ACGTTGGATGGCAAAGGTGACTCTTGTATG | ACGTTGGATGCTCAAGTTCAAAGTTTCACG |
| 8021248 | ACGTTGGATGGGTTTATCAGGGGTTTCAGC | ACGTTGGATGTGGCAGGAAGTGAAAGACAC |
| 11158985 | ACGTTGGATGGTTGAGATTTGGGTGAGGAC | ACGTTGGATGCACCACCACACCCAGTTAAT |
| 10483850 | ACGTTGGATGCATTTCTGGAAGGAAGTGGC | ACGTTGGATGTTATTCTGATGGTAGTGCTG |
| 8010875 | ACGTTGGATGGGCCCAGGCTTATTTCTCAT | ACGTTGGATGACACAGATCTGTTTGGCTGG |
| 11626844 | ACGTTGGATGAAAGCTTACAGGCAGCAGAG | ACGTTGGATGTTAGCGCAGCTATTCACCAC |
| 982972 | ACGTTGGATGCCTCCATGAATTGCACCTTG | ACGTTGGATGGGGACAAAGCCAGAATACTC |
| 7161198 | ACGTTGGATGGAGAGATAGAGATACCAGCG | ACGTTGGATGTCTTCCAAAAAGCCCCCAAC |
| 7160347 | ACGTTGGATGTAGCTGTGTGTGGGATTTCC | ACGTTGGATGGTGCTTTGCATCTTCTGGTC |
| 8007139 | ACGTTGGATGGGTGAGACAGAGAGAGATTC | ACGTTGGATGAGGGACAGTAGCCACATATG |
| 8014483 | ACGTTGGATGCTTCTAACAGTGAAACTGGG | ACGTTGGATGTCTCTTTGCCTCTTTCATGC |
| 12437072 | ACGTTGGATGATCAGAGGTTCCAACGTCAC | ACGTTGGATGATGAGCTGGGTAAGTGAAGG |
| 8004767 | ACGTTGGATGTATATTCTCTCCCCTCCCAC | ACGTTGGATGCGGCTTTTCCTAGGAAAACC |
| 12588830 | ACGTTGGATGTAGCACTTACTTTGCCCTGC | ACGTTGGATGGCTTCCACTCCAATAGAGAC |
| 7158449 | ACGTTGGATGTATTTTTTGGAGATAGGGTC | ACGTTGGATGTTGAGTCAAGGAGTTTGAGG |
| 6574103 | ACGTTGGATGATCTGAACCACTTCCAAGGC | ACGTTGGATGAGTAGACCAGAGAGCATTGC |
| 8020478 | ACGTTGGATGAAAGAATCTGGCCTGGCATG | ACGTTGGATGTCGGGTTTTATCATGTTGGC |
| 4903077 | ACGTTGGATGGCCTCCCAAAGTGCTAAGAT | ACGTTGGATGACTATGCCTAGGTCTCCTTC |
| 8012359 | ACGTTGGATGCATCCCGGAGAGAAACTTTG | ACGTTGGATGAATGCAGAATGGTGGTTCCC |
| 4899449 | ACGTTGGATGCTTAATGCCACTGAAAACAC | ACGTTGGATGGAGGCATTCCCTCAATTTTTC |
| 10690289 | ACGTTGGATGTAGCTTGTGATCTGGGACAC | ACGTTGGATGGCCAGAAAGTTGTTGGCTTG |
| 6574104 | ACGTTGGATGGAACAATGCTGGCACATGTC | ACGTTGGATGACCTGAGATGATCACAGTCC |
| 2110552 | ACGTTGGATGTATTGGTCCGGTTACTGGTG | ACGTTGGATGCCCTCAGTGACAGTTTTACG |
| 8008256 | ACGTTGGATGTAGTTGTTTGAGTGACTGGG | ACGTTGGATGACTGTGAAACACCAGTAACC |
| 759283 | ACGTTGGATGCGACAGAAAGAGCTAAGAGG | ACGTTGGATGTGCTGTGGCACTCAGTTTAG |
| 4999177 | ACGTTGGATGGAGCAACACCCTGTCTCAAAA | ACGTTGGATGTTGATTTGTGCATACCTGGG |
| 2333006 | ACGTTGGATGATAGCATTATGTTTCCCAGG | ACGTTGGATGTGGATTTGATAAAGGCCTGC |
| 8006178 | ACGTTGGATGGCGCAGTATCTCTAAGCTTG | ACGTTGGATGAAACACGCACCCTACTGTGA |
| 11158986 | ACGTTGGATGACCGCTGATGCTGTTTCTAC | ACGTTGGATGCAGCCCGGTTATGTGATTTC |
| 7150625 | ACGTTGGATGCGGACTTGGCGGCTTAACAG | ACGTTGGATGCTGCCTTCCTCCTCCTTTTC |
| 8007768 | ACGTTGGATGACTAAAGCCAGCTCGCTCGC | ACGTTGGATGTTTCCCCGGCAGCCCCCGGAT |
| 8007058 | ACGTTGGATGAAACTCCCCGCGAGCGATCG | ACGTTGGATGCTGGGTCCAGCGGACGGAC |
| DPF3-AA | ACGTTGGATGTGTGATTGGCCCGTCGCTTC | ACGTTGGATGGGTTGTGAATGACAGTCGCC |
| 2215901 | ACGTTGGATGAAAAGGGAGTGACCTCTGGG | ACGTTGGATGAATCGGCGCTGCTGGTAGCTA |
| 3814866 | ACGTTGGATGATAATACTCTCCCGTGCGTC | ACGTTGGATGAGAGCCAGCAGGTCTTAAAG |
| 3814864 | ACGTTGGATGAGGGTAAATCCCCGTGTTTC | ACGTTGGATGACGGCAGAGCACATGTAGTA |

[0394] TABLE 43

| | | |
|---|---|---|
| dbSNP rs# | Extend Primer | Term Mix |

| | | |
|---|---|---|
| 11846274 | GTGCCCTTCCCACGTGTG | ACG |
| 2526935 | GGTTTTGCCTTGGGCTGCTT | ACT |
| 929328 | AGAAGCTATAGCTCTGAGCC | ACT |
| 3742840 | CGTGCTGGCTTAGACTCTC | ACT |
| 9671739 | GGAGGTGCAACTGGCAGG | ACT |
| 8006208 | TGAAGGCTAGGCCAGCATG | ACG |
| 8006230 | CCTTGGCAGGGCATCGACT | ACT |
| 8007836 | ATGGACTCTGTTCCCTTTCC | ACG |
| 8006889 | GGCATTTGTGCTCCTCTGG | ACG |
| 8010823 | CAAATGCCATGTGGACCAGA | ACG |
| 8011029 | GGGAAGCAACAGTGGCGTA | CGT |
| 10649920 | GCAGAGGGAAGGGAGGAAA | CGT |
| 2803956 | AAGTACCCAACTATTGCCAAAT | ACT |
| 2803957 | GTGTGTGTATGTGCGTGCG | ACG |
| 2526934 | GTTGTGTTGCTGAGGGAATAT | ACT |
| 9671558 | CACAGCCAGGGCTCACTCA | ACT |
| 2526933 | TCCGGGCTTGCCAGTTCC | ACT |
| 2803959 | GGGATGTGGGAGGATAGACA | ACT |
| 2526932 | TCTTACTCCCATCCCCAAAG | ACG |
| 2803960 | AAGTGGACAGAGCTCCTCC | ACG |
| 12434675 | GGTCCCCATGTCTCAGCC | ACG |
| 4899435 | CAGAGAGGTGAGGCTGCCA | ACT |
| 2526931 | AGGTGACATTGGTAAAGATCC | ACG |
| 2803961 | GCATGGTCTTTGCAGGTATTC | ACT |
| 2803962 | AGGCGGACATGGAAAACATC | ACG |
| 12590634 | GCTATTGTGGCACTTGGGAA | ACG |
| 11327712 | TGTCTCCAAAGGCTAATAATTG | ACT |
| 2803963 | CTCCCCACCTC1TTCTTCTA | ACT |
| 11844834 | CCAGAACGCGCCCTCCTC | ACG |
| 11320415 | CCACTGCATGTCTGGGAAAA | CGT |
| 8012752 | GGCGTCTTGGAGGAGGTAC | ACT |
| 11623878 | ACAGGCATGCGCCACAGC | ACT |
| 11623926 | ATCCCAGCTACTCAGGAGG | ACG |
| 12434442 | TCTGATCGTATCACTCCCCT | ACT |
| 2526930 | GTCTGGGCCTGAGATATGGA | ACG |
| 12435306 | GATTCCCATTCTGCTGGAAC | ACG |
| 10144028 | GCCCCAACAACCTCACCC | ACT |
| 4899436 | GCCAAAGACCAGCGTCAAC | ACG |
| 7140593 | CATTTGCCTCATTTTTCTTTTGT | ACT |
| 2107687 | GGTCTGGAGCATAAAATGTATAA | ACT |
| 991882 | CAAATACTGTACTCTAGTTAATTT | CGT |
| 3327 | CTTTGTCCTCAATTTTTAACACT | ACG |
| 2526928 | GATATCCCACAATCACTATTTTTA | ACT |
| 7401336 | AAAATGTCAGACAGCACAGAG | ACT |
| 2526926 | AATATCTGTAGGTGCATATAAAC | CGT |
| 994760 | GAAACAACAGCATTAGGGCC | ACT |
| 994759 | CCCACATTCTTCACCACCC | CGT |
| 994758 | CCTGCTGGGGAATATGGTCT | ACG |
| 11848404 | GTCCGTGGTACTGTTCAGG | CGT |
| 2526925 | GCTCCATTTCTTTGCCATCC | ACG |
| 11844236 | CTTGGATGACATTCCCAAGTC | ACT |
| 2526924 | ATTGGCTTTGCCCTGGGTG | ACG |
| 2803965 | CCCTCTCAAGGTGATACCAT | ACT |
| 2526923 | TAGGATAACTATTCATTAACTTAC | ACT |
| 7152467 | AACTAGTCACATCTGAATAAAGT | ACG |
| 11623462 | AGGGGTGGGAGGGTACAG | ACT |
| 2803966 | ACAGCCTCAAGCCCCCGA | ACG |
| 2526922 | AATAATACACACTGTTAGACAAAA | ACT |
| 2526920 | CACCACTGACCCAGCTCAA | ACG |
| 11848135 | ACTAACACTAGTTTTGCCTGG | ACT |
| 11629210 | GCTGCCAATTTCTATGCACG | CGT |
| 2803967 | AAAATTATCTTCCTAGGTATGCA | ACG |
| 16455 | CAGTGTGTGAAGGTCAGGC | ACT |
| 757655 | GTCAGGCGGCTGAATCATTG | ACG |
| 5809581 | GTTTTCCACCAGCTATACATCA | CGT |
| 3057139 | GTTTTCCACCAGCTATACATCA | CGT |
| 2247658 | ACAGGCGCCCGCCACCA | ACG |
| 11625609 | CCTTAAAGGATAAATAGGAGTTTT | ACG |
| 8005580 | TTGCAGGAGATGATGCTAGAA | ACT |
| 8010472 | TCCCCAGCCATCTCCAACA | ACG |
| 2526919 | GAGGCACCTCATGACATCC | ACT |
| 2803968 | ACAGTGTAATGGAGGTGTGG | ACG |
| 11623943 | GTTGTGGGTGTCTCGATTGTA | ACT |
| 11623946 | GTGGGGTTGTGGGTGTCTC | ACT |
| 1557926 | GATTGAAAGGAGCCAGTGAG | ACT |
| 12434611 | GGATAGCTAAATATGTGGCAC | ACT |
| 2526918 | TGACAGCCACTTGGAGTGC | ACT |
| 5809582 | CCTATCTCTGAAAAAAAAAAAAAAA | CGT |
| 8008279 | GTTTCACTCTGTCACCCAGG | ACT |
| 2803969 | GCCAGGCATGGTGGCACAT | ACT |
| 2526917 | AGCATAGGGAGACCCCATC | ACT |
| 8008774 | CTGGTGGAGTAGAAAAAATATTA | ACT |
| 2803970 | GAAGGGATTTTTTAATGATGGC | ACT |
| 8010255 | CCATGGTGGGAAAAGAAGAG | ACT |
| 2997642 | TTTCCCACCATGGACCCCA | ACT |
| 2803971 | GCGTTGAGGGTGTGGGATG | ACG |
| 11313760 | TCCCATTCATGGCCAAACCT | ACT |
| 2803972 | CTAGGTCAGATCCGGGGTG | CGT |
| 4903038 | GGTGATTCGCATGCACAGG | ACT |
| 2526916 | AAGTCCTGGGAGGATGGGA | CGT |
| 4903040 | CTGCTTACAGCTCTGCAGC | ACG |
| 2803974 | CTGCAGCCACTAAGTGGAG | CGT |
| 2803975 | TCCCTGAAGACCTTTCTCCA | ACG |
| 2803976 | ATGACTGGATTCAACAGCCC | ACG |
| 2803977 | CTTTTGATCATTTTCTATTTTAGC | ACT |
| 10139909 | GGCAGTGAGGCAGACACCA | ACG |
| 722945 | GCCAGGAGCTCCAGTCCA | ACG |
| 917069 | GTATGCTGGCTGAATGGTCT | ACT |
| 2803978 | CTTCCCCTCAATGTCTTCTAT | CGT |
| 2332890 | GGTTGGGAACCCGAAGAATA | ACT |
| 1989638 | GAGAGAAGCAACAAAGTGAGAA | ACT |
| 10679174 | TACATTAATCCCCCCCCCC | CGT |
| 2526915 | GGCCGAGCGGTGTAGTGG | ACG |
| 2526914 | AAGGCCACTTCCAAACCCC | ACT |
| 11158964 | AACAGACAGCAGAGAGCCAT | ACG |
| 11158965 | CTTCCTGTTCAGCCACCAC | ACT |
| 740081 | CCCCCTGTCTTCCTGACTT | ACT |
| 740080 | TTGCCTCTTGTTACCCCATTT | ACT |
| 10140582 | CTGGCTGTGAGACTGTCAG | ACT |
| 2526913 | AGTGGGAAATACCTGAGCAAA | ACT |
| 4899437 | TGCCTTACACAGTGGAGAAG | ACT |
| 10145678 | TTCAGAAAAGAAGTGATCGGC | ACT |
| 2107686 | CTGAGAATAATATCCAAGTCCT | ACT |
| 2107685 | GCTCGTGGCTCATGCTACC | ACT |
| 2107684 | CAAAAGGCTTGAGACATTGCTT | ACG |
| 7154188 | CTTGGCTATCAGTGAGTTCC | ACT |
| 4903041 | AGGTAACCAAACGATGTGTGT | ACG |
| 7159637 | CTACCCTGTGATCACATATGAA | ACT |
| 6574089 | GGTTTCTTAGAAAAGAAGGGTAA | ACT |
| 12589753 | CCATAGATTAAGGCAAAGATCC | ACT |
| 4899438 | GATGAGAGGTCTGGCATGAA | ACT |
| 4903042 | AACACAGAGTAAAATGAAGTTTC | CGT |
| 4903043 | CCACGTATCTTTTGATGAACAC | CGT |
| 2803980 | TAAACCGCATTTAGCTTATCCA | ACG |
| 10483848 | GCTTTCTTTTTACTGCTAGGAA | CGT |
| 2240344 | GCTGACCAGAATACCCAGC | ACT |
| 2286068 | AGACGGCGGGTGTTCTAAC | ACT |
| 11339669 | CATCAGACATGATAACTAGGAG | ACT |
| 3854 | AAGAAAAATGCCCCACATTTTAA | ACT |
| 11463 | TAAAAGGAAAAAAGTGCTGACAT | ACT |
| 1383 | CGCCTTGAACTTCAGCAGCA | CGT |
| 1381 | ACCTGCCCTATTCCTGGCT | ACT |
| 1377 | CTGGCCAGAGGCAGAGAGA | ACT |
| 11158966 | AAAAAAAAATTCCCCTCCACTTA | ACT |
| 11158967 | TTTTCACAGTTAAAACACCCCA | ACT |
| 11158968 | TGATGTCATCTCTCTCCCTG | ACG |
| 11158969 | CTCTCCCTGCCATCCAAGTA | ACT |
| 11158970 | AGCCACAGAAAACCCCATCA | ACT |
| 11158971 | GGGACTGTCTCCGAGTAACT | ACG |
| 11849782 | GATAAGGGAGGGAGAAGAGG | ACT |
| 10137616 | TCAGGCACTGTCTGGAGGA | ACG |
| 757572 | GACAGTGCTGAGCAGTCACA | ACG |
| 10140566 | TCCTTCTCAGTGCATTACATC | CGT |
| 2023480 | GACTAACCAGTATCGAGGTTG | CGT |
| 2526911 | GTGGAAGCCTAGAGTGGAG | CGT |
| 4903044 | GTCTGCTCCAATTTTAAGTACA | ACG |
| 11845162 | CTTTAAGGGTTCCTGCTTACT | ACT |
| 12147210 | GCAAAGGAAGCTGGCCAGAT | ACG |
| 2997643 | ACTTTAGTGGTGGATGTGATAT | CGT |
| 2997644 | CATTGCATTGGAGGGAAATGT | CGT |
| 3814867 | GTCGTTCTTTGCCAGGAGG | ACT |
| 2286067 | GTTAATCCCTTTGGTGTGCAA | ACT |
| 1060570 | CCCAAATCCCCGTCACCAG | ACT |
| 2332891 | CACACACACACACAGACACA | ACT |
| 2021736 | AATAAATCAGAGCATCCTGAAAT | ACG |
| 7160830 | GTCCATTTGTGCAATTCTGTCA | ACT |
| 2526909 | TTCTTTGTTTTCCATTTCAGGG | ACT |
| 7140963 | GCACTTGGGGTCTTGGGCA | ACT |
| 10143667 | CATTTCCAGGGGCTGCTTGA | ACT |
| 2803981 | AAGATGAGATTTGGGTGGGG | ACT |
| 768840 | TCCTCCTTTGCCTTCTGCC | ACT |
| 5809587 | CCCTGCCATCCCTCTCTAA | ACT |
| 2023479 | GCTCCCAGGGCATCACTGT | ACT |
| 4903045 | AATATCATATTGGGCGAATCAG | ACT |
| 4903046 | CGGATCTCCGCTGTGGTGT | ACT |
| 5809588 | GCACAAATGCGCGGCCAC | ACT |
| 10220555 | GGCTGTGCTGCCCCAAGA | ACG |
| 2906132 | GGTGTGACAGTCATGTCACC | ACG |
| 11848482 | CCGGAAGTCATTCACTTAATCT | ACT |
| 10129954 | TGCTCTCAACACTTTCATCAC | ACT |
| 252692 | TTTAGGATTCATCCTTGCCTCT | ACG |
| 4903047 | GACTGGGTGGCTTAAACAAC | CGT |
| 11846357 | GCCTTGGGACTAGGGCCC | ACT |
| 10136385 | GGGCTCCACGTGTCTCTTG | ACT |
| 12588242 | CCCTGGACTGACCAACTCC | CGT |
| 11621517 | CCTCTTAGGAGCTCTGAGTA | ACG |
| 2526910 | GGGGTTTGCAAAGGCTTCAC | ACG |
| 2526941 | CCCCCAAGCTGATGCTCTC | ACT |
| 2803944 | CATCTCACAGTGCCCTCCT | ACG |
| 12436770 | GGGGAGGCCCCGGATCC | ACT |
| 10220279 | ACATGCACGCACACACACAA | CGT |
| 10220280 | GGGTGTGTGTGTGTCTATGC | ACT |
| 11844112 | CATGCCCTGGGGTTTGGAAT | ACT |
| 12432455 | CACCTGTGGCCAAGACCATT | ACT |
| 8015338 | TCGAAATGCCTGCTTGGCTA | ACG |
| 3832969 | TTCAGCCAGCCAGCCAGC | ACG |
| 9671972 | TAGTGTTTCACTGTTTAGAACG | ACT |
| 9671975 | TTAAGTAGTTCTTCTTATTCCTG | ACG |
| 7159986 | CCTTAACAAAGAAGTCCAACCA | ACT |
| 11848220 | CTTCCTCTCTCTCATAAATATTG | ACT |
| 5016369 | GTTGTCCAGAACAGCCTTCTA | ACT |
| 1986423 | GAGATGGGCGAAGAGGCAA | ACT |
| 2332909 | ATGGGCGAAGAGGCAAATTG | ACG |
| 8013337 | CAATTGAAATAGCCCCTCGC | ACG |
| 11445680 | AGGTCCTGTGTATCCGCAG | ACT |
| 4903048 | GGTAAACACTCAATAGCTGTTG | ACT |
| 12434793 | TCAAGACGTTTCTTTCCATTGT | ACT |
| 2332910 | GGGCAAACACTCCTTCTGCA | ACT |
| 4410017 | GGAGAACGGAGGGTGGGAA | ACT |
| 4577019 | GAGAACGGAGGGTGGGAAG | ACT |
| 2332911 | ACCTGCTCAGACTGGGTAC | ACT |
| 4996747 | CTGGGTACGCAGGGTACAG | ACT |
| 10140820 | TAGCTTCAGGACCTACAGAG | CGT |
| 12431623 | GGACATCTCTAGGAAGGTTG | ACT |
| 6574090 | TTTGTGCTCCTGTTAGAATCC | CGT |
| 8008750 | CTGATGTTCCCAGCAACCCT | ACT |
| 11627420 | GGGCAGGGAGTGGTCACA | ACG |
| 10150185 | TCACCACACTGACTTCCACA | ACT |
| 10150218 | ACGTACCATTTTAACGCCCC | ACT |
| 9646164 | GAGTGGGGCAGCGGGGC | ACT |
| 6574091 | CACGTGAGCCTTAAAGAATATG | ACG |
| 2332912 | CAGGAATTAAGACCATGATTCA | ACT |
| 7155359 | CTGCAGTTAGCAGCTACAATA | ACT |
| 2332913 | GAAGCTTGGAGCAAGAACACA | ACG |
| 4544184 | ATTTAACCCTTCCTGGAATGC | CGT |
| 4337224 | GGTCTACACTTAAGCATGGCA | ACG |
| 2332914 | GCATCAGACCCCATGCCC | ACG |
| 4280167 | CGGTCCCACCTTCCTTCCT | ACG |
| 4903049 | CTAGTAGAAACCACCTCTTGG | CGT |
| 3742837 | CACGGTAGTGTGTGGGAATTT | ACT |
| 10139937 | CCCACACACTACCGTGCC | ACT |
| 12434292 | TTAGCCTCCTAGCTTCACTG | ACT |
| 11620671 | GGGATGGACACAGAAGCCT | CGT |
| 10140184 | GCCCAGTGCACGAGTGTAG | CGT |
| 2332915 | CCTCCCTCCCTCCCACCA | ACT |
| 2332916 | GGGACTCTTCCTGAGGCAG | ACG |
| 8012759 | GTCACCTCCTCAGAGAAGC | ACG |
| 10149272 | CTTAGTGCTGTCCCCTGTG | ACT |
| 11158973 | TTATTATGACCCCCTAACACTT | ACT |
| 4903050 | CCTTTGGCTGGTCACCTTC | CGT |
| 10666445 | CAGAAACCACCTGGGTTCCT | ACT |
| 2536143 | GACAGACTCGGTCCCAAGC | CGT |
| 10638231 | CACCCTTGCTATTTTTTTTTTTTTT | ACT |
| 12431636 | GGCTCAATCTCGGCTCACT | ACT |
| 8005904 | CCTCGTGATCCACCCGCC | ACG |
| 11621058 | CTGTAACCAGAGGTGCACAC | ACG |
| 10133224 | CTAAGGTAGGGATTACAGAATA | ACT |
| 12433185 | CAGTTCAGCTGTTTTGCCCA | CGT |
| 740974 | GGACCATTTCCCACACTTGC | ACT |
| 740973 | GTGCATGTCCAGACCCACTT | ACT |
| 740972 | TCGAGCTTGGACTTCCTGG | ACT |
| 740971 | GCCCAGGAAGTCCAAGCTC | ACT |
| 4243642 | AGAGGTATGCTGTGGAATCC | ACT |
| 4415952 | GCTTCTAATATAGTATAAAGCCC | ACG |
| 2215589 | GAGCCTGAAGGGGTGAGAT | ACG |
| 4343211 | GGGACCTCCAGAAGTAAACT | ACT |
| 2536142 | GCTTTTTCCTTGTCCCATCC | ACT |
| 11293340 | TTATAGTCATGATTATGGTTTATTT | CGT |
| 10151620 | ACGACCTGGGATCAGAGCT | ACT |
| 2286840 | CAAAGGCAGCGTCTTCACTT | ACT |
| 8023089 | CCCTTTTCTATGTGGGGCCA | CGT |
| 8008009 | CAAAACTGTTTTCAGCCTCAG | ACG |
| 11419089 | CCCTGTCTCAGAAAAAAAAAAAAA | CGT |
| 10694676 | CCCTGTCTCAGAAAAAAAAAAAAA | CGT |
| 2536141 | GGTTGAGGCTGCATTGAGC | ACG |
| 765247 | ACACAGTGAGCCCATAAAGAA | CGT |
| 7147626 | GGAGCCTGCCACGTAGTC | ACT |
| 10132629 | CCTAGCATGGAGCCTGCCA | ACG |
| 4903051 | CTCTTCTCAAAACAGTGGTAG | ACT |
| 11158974 | GACACCCCACCCCCGTC | ACT |
| 1035021 | GATGTGGGGCCAGCAATGG | CGT |
| 6574093 | GCAGTGGCTCTGCCCCAT | ACT |
| 4899439 | TGCCCTGGCCATTTCCCC | ACT |
| 7155287 | TCTGGGACAGGCCTGGCA | CGT |
| 7154402 | GAGAAGCCAATCTGAAAAGGC | ACT |
| 7154781 | CGGTTCACTCTTGGCGTTG | ACG |
| 6574094 | GGGGTCCCCAGCAGGTG | ACG |
| 10132242 | GCCGTGTGAGCCCACATC | ACG |
| 10146959 | GCATGGCCATGAGGAGGTC | ACT |
| 10147466 | CCCTGTCTCTAAAAGAGAAAGA | ACT |
| 11626411 | AGCTCCTGTCCTGGGGCT | ACT |
| 4899440 | AGAAACAGAGGGAGTCTGAC | ACG |
| 10144553 | GTAAGCCTCCTAAAGGCAGG | ACT |
| 11627663 | TGCTGTGTGGCTGTTGGTG | ACT |
| 11627799 | TTACATTCTGAGACTCACTCC | ACT |
| 11851733 | GAACCTATGGGAGCAAATCAA | ACG |
| 10140317 | TAGAAATACCAGATCGGATACA | CGT |
| 8007375 | AACACACTTCTATTGAGCCCT | ACG |
| 4899441 | TGACAGCTGCTGCCGCTC | ACG |
| 11158975 | GTGTGTGTGTGTGGTTTTTTTT | ACT |
| 11419607 | GTGTGTGTGTGTGGTTTTTTTT | ACT |
| 2109793 | GGCTCACTGCAACCTCCC | ACT |
| 8023156 | GTGGAAAGAAGGGAGCTCATA | ACT |
| 10140579 | CTGTGGCTCTGCCATGATTTT | ACG |
| 7148199 | GAATTTGCTGCAGACAGCTC | ACT |
| 7146916 | CACTGCTGGGTGGGTCTC | ACG |
| 1990439 | GTCACACAGACTTCGTCCC | ACG |
| 6574095 | CAGCTCCGCAGACCTGAG | ACT |
| 10140037 | GGGTGTGGAGGGGCACC | CGT |
| 8007249 | TCAAAAAGGTCATACCAATTCC | ACT |
| 1990438 | ACAGACCTACTACTAGGCCT | ACT |
| 1990437 | CTTCCTTTCCCTTCCCCTC | ACT |
| 10146484 | CTCAGATACATGAGCAGCACA | ACT |
| 11627333 | GGTGAGAGAAATCAGACTGTG | ACT |
| 7155802 | CAGATTAGCTGGCTGGGGT | ACG |
| 2109792 | GCCTGGTTGCAAACTCCTG | ACT |
| 11429363 | ACCTAGCTATTTTTTTTTTTTTTTTT | ACT |
| 8004210 | GGTGTCCTGTGTCCCAGCT | ACT |
| 2098194 | CTGTGTACTCACAGGCTCAA | ACG |
| 2109791 | CGCTAGGTGGTGCCCCAG | ACT |
| 11381729 | TCTCTCTCTTTCTTACTTTTTTTT | ACG |
| 1160094 | AATCTAGGTTGCCTGATTTCC | ACG |
| 11628051 | TCTTTCAAGAGATAATCCATGC | CGT |
| 10136771 | GGGGACTACAAGTGCATGC | ACG |
| 10139903 | AGGTACCTCACTCCTTCCTT | ACT |
| 4903053 | GCCTGGGCAACAAAGCTAGA | ACG |
| 3742836 | GGATCTTCAGGTGGGTGCA | ACT |
| 3742835 | GAAACTACCCTGACTAACCC | ACG |
| 8003233 | GTGCCACCCTGTGTGTGTG | ACT |
| 11621588 | ACCAGCAAGCCAACAAATCC | ACG |
| 740981 | GCATATGTGTGCGTGCATGT | ACT |
| 8019492 | CAGAGCAAGATTCTGTGAAAGA | CGT |
| 8019644 | TTCCTTCTTTCCTTCCTTTCTT | ACG |
| 8019646 | TTCTTTCCTTCTTTCCTTCCTT | ACG |
| 8019653 | AAAGAAAGAAAGAAAGGAAGGAA | ACT |
| 11450794 | AGGAAGGAAAGAAGGAAAGAAA | ACT |
| 11348193 | TCTTTCTTTCTTTCTTTTTTTCTTT | ACG |
| 11450793 | CCTTTCTCTTCTCTTCTCTTCT | ACG |
| 11282735 | CCTTTCTCTTCTCTTCTCTTCT | ACG |
| 2191823 | AGAAGCTGGAAAATATGACTTAT | CGT |
| 12232220 | ACAATGATGGCCGGGCGC | ACT |
| 11158976 | AAAATAAACTAATGCATACTTTGTA | ACG |
| 4903054 | TCCTTCGTAATAAACTGGCATT | ACG |
| 11846755 | CTGCCTCAACTTCATATGCCA | ACT |
| 12431988 | GCTATGCTAGTAGGGGAGG | ACG |
| 12100526 | TCTTGGACATTTTGGCTGTTAT | ACT |
| 11622568 | TCAACCTGTGGGTTTATGGG | ACT |
| 9671230 | AGTCCTGGAGAGGAGGAAG | ACG |
| 12147487 | AGTAGTTTCTGATGGCCTTCT | CGT |
| 4903055 | GCACATGCCACCACACCC | ACT |
| 12147515 | CGGCTCACTGCAACCTCTG | ACG |
| 11625092 | CAGAGATGAGGCAAGATAAGC | ACG |
| 4899442 | GACCTAACTACCAATTCACAG | ACT |
| 2052146 | GAGCTCTGATAGTGATTGTGAGT | ACT |
| 10220553 | CCTGGATATGTTTTTAAAAATGTT | CGT |
| 10220565 | CTGTAATCCCAGCGACTCAG | ACT |
| 2332917 | GGCTTGAATTTACCTGGCATAA | ACT |
| 7158910 | GTCCACTGCCCCCCGAC | ACG |
| 8015749 | AATATCCTCAGGGTTAACCTAT | ACT |
| 8006812 | TCTACCATCATCTCCAGGGA | ACT |
| 8008338 | GACCAGGTGTTGGCAGAGA | ACG |
| 2052145 | ATTCAGATGGGATCACAGAAG | ACT |
| 2052144 | ACTCAGCTCTCAGAGCTGG | ACT |
| 10146692 | GAGGCGCCTCTTCCTCACT | ACT |
| 11627305 | CCGCCCACAAACACACACG | ACT |
| 2079989 | GGAGGAGGCATGTCACATGA | ACG |
| 8018881 | TCAGGTCAGGAGGATGGAG | CGT |
| 4561387 | AGAAGACAAATACTAAACATTGAA | CGT |
| 11622025 | GAGAAAGGAATGGCTATTGATT | ACT |
| 740980 | CACATTGGGTAAATGATGA | ACT |
| 12433250 | TGGAGAAATGAAAATCTCAGGA | ACT |
| 5809590 | GATGTCAGCAGCATTGAGAAT | ACG |
| 758915 | GACATCAGACCTATGCCAGGA | ACT |
| 758914 | CCCCAGTGATCCTGAGAAAT | CGT |
| 7154229 | ACAAAGTCTGCTAACTGGGC | ACG |
| 12437188 | AAGGGATACCTTTGTCCCCA | ACT |
| 7159108 | CAAGGAGCTGCCAAGGACA | CGT |
| 4903058 | CCACCTCACTTTTGTTGCATT | ACT |
| 4899443 | GTAGCCTCCACCTCCCAG | CGT |
| 11848907 | ACTCCAGCCTGGGCGACA | ACT |
| 12432148 | GGAGGTGTTAGTAGGAGAGA | CGT |
| 12435078 | TGCCATCTCCTCTACCTGG | ACG |
| 6574096 | CTCGACACATATCACTCAACA | ACT |
| 11158977 | GCTGGCAGGAGACCCCC | CGT |
| 11629434 | AATCCCATGCCAGCAGGTG | CGT |
| 4378563 | GGCCTCCATGCCCTGCTTA | ACG |
| 2098195 | TAAACCTTTCTATGTTCCTG | ACT |
| 4633653 | CTGGGACAGGGTATGATCC | CGT |
| 7148350 | GTGACCCTTCCACCATCAAC | ACG |
| 740979 | TGCTTTGGGGCAGACTGAC | CGT |
| 740978 | AAGCCTTCCTATCCCCA | ACT |
| 740977 | TGGTTTTCGAATAAGTAGCCAC | ACT |
| 740976 | ATCCAGATGGCCCTGAC | ACT |
| 4903059 | TCCACACCACGCTGCCTC | ACG |
| 4903060 | AGGCCAGAGAAAGAGGCGA | ACG |
| 11852056 | CCCCTCAAGAGCCCCATC | ACT |
| 9635257 | ACCACTGCCGCTGCCCC | ACG |
| 9635258 | CAGGGTTTGTTCTCTGTCTC | ACG |
| 9635259 | CCATCACAGCTTCAAAATCACA | ACT |
| 4899444 | AAATTCCTTAACCTCTGTGAAC | ACG |
| 12435382 | CTCCCCTGGGGCTTCCC | ACG |
| 12435412 | GGGCAGGTCCAATGAAAATCA | ACG |
| 11627381 | AGGACCCCACATTGTGGTAA | ACG |
| 2052143 | TCTACCTCCACTTCCAA | ACG |
| 2052142 | AGCCAGGATAATCTCCTCA | ACG |
| 2052141 | CTTACCCCCAAAGATGTCCA | ACG |
| 8021035 | GAGGCTAGGACCAAAGGAAC | ACT |
| 11158978 | CTCAGGAGGCTGAGGTGG | ACT |
| 11621216 | CATTTACCACTCACAGGGTAT | CGT |
| 10130873 | TTGTCACTTCCTCATGCCTC | ACT |
| 11621358 | CTTGTCACTTCCTCATGCCT | ACG |
| 758913 | CCAGTCTAGTTTTCGATCACC | ACT |
| 11622602 | CAACGTAGGATGTGGTGATC | ACT |
| 10136931 | CCATATTTTCAACATACATACATA | ACG |
| 740975 | ACCAGCTCTCTTTGGAT | ACT |
| 747987 | AACCTGGTTCTGCCATT | ACT |
| 11623819 | GGCAACTCCTTCCACAATGG | ACG |
| 12434445 | CTGAAGCAGCTGGGAGCC | CGT |
| 8003375 | CTGTCAGATGCCACACATCAA | CGT |
| 10143596 | AGATGGATAAATAGATAAATGGAT | ACT |
| 12435321 | TGACTGCAGTGGGCTGCC | ACT |
| 12435401 | TTTTGGGTGTCTGGAATAACG | ACT |
| 8010609 | GGCTGCCTGCCCAGATCC | ACT |
| 11158979 | GACACCAAAACCCAGTGCCT | ACT |
| 11158980 | ATATGCTCACAGTTCAGGCAA | ACG |
| 11627524 | TGCCTGGACAAGGCCCATA | CGT |
| 1126160 | GAAGCCCATCGCTAAGTGTTT | ACT |
| 10136074 | GGTGACACGTTGGGCTTGT | ACT |
| 4903061 | CAAAGGTAGTTGAATCTGATTC | CGT |
| 10665398 | TGTTTGTGTGTGTGTGTGTGT | ACT |
| 6574097 | GTGTGTGTGTGTCTGTGTGT | ACT |
| 9671654 | ACACACACACACAAACACACA | ACT |
| 10140024 | AGGCTGGGCACAGTGGCT | ACG |
| 10142421 | AGATCACCGCAACCTCTGC | ACG |
| 10142593 | GGCAACAAGAGTGAAACTCTA | ACG |
| 11423372 | TCTTGCTCTGTCACCCAGG | ACT |
| 5809592 | TCTTGCTCTGTCACCCAGG | ACT |
| 2332918 | TCTCTCTAATGGGGACC | ACG |
| 2332919 | ACTGGATCCCAGAAGAG | ACT |
| 8007348 | GGAGGCCAAGGAGTTTCAAG | ACT |
| 1990443 | TTCCCCTCAGCTCTTAG | ACG |
| 8007690 | TAGCCATCCTTCCTCAGATG | ACT |
| 3937455 | TCCTTTTTTCCCCACCC | ACT |
| 8012823 | GCTCCTGGAGGGCTTCCAA | ACG |
| 4899445 | CCCTCTCCAGGGCCATGC | ACG |
| 4903062 | CTTGGGCAAACTCCTTAAAATA | ACG |
| 973963 | AACAACCAACTCTCCAG | ACG |
| 10149962 | CAGCAGAACCGAGGTGAAAT | ACT |
| 8003449 | CATTTTCAGGGATGCCTCCT | ACT |
| 11620775 | GCACAAAGCAGCAGGGAAC | ACG |
| 8009089 | ACAGACACTCCCACATCATC | ACT |
| 8008967 | CCGACTTCTCACTCTTTCTG | ACT |
| 12050132 | CAGGCCTCCCCATGCACT | CGT |
| 10133018 | AAATAACCCCAAGAAGCAGAC | ACT |
| 1990442 | CTCCAACTCAGAACATGCTC | ACT |
| 1990441 | CATGAATGTGATTCACATTCTCC | ACT |
| 8015833 | GGAAGAGACGGGCGGAGAA | ACG |
| 1990440 | CGTCAGCAAATGTGTACCGA | ACT |
| 4903063 | CATTGAGATGGGAAGGGCAA | ACT |
| 10139810 | TTTTTCCCATCCCCACCCC | CGT |
| 4903064 | GTGTCAGCAGAAAAAGTGTAC | ACT |
| 2159715 | CATAGGGATAGGAATGGG | ACT |
| 2109795 | TCCCAGAATTTGGAGCC | ACT |
| 2159714 | CAAAAGGATCTGCAAAAG | ACG |
| 11623107 | TAGTGAGCAGGGGAGCCTA | ACT |
| 7152005 | GCTGACCCCAGGCAGGG | ACG |
| 7152489 | CTGGGGCTCGAGCACAGA | ACT |
| 4479167 | GGTGTCAGCAACCACACCC | ACT |
| 4606655 | GCACCTGCCATCATGACCA | ACT |
| 4606656 | CTGCCTTCCCGGTTAAGCA | ACT |
| 4489943 | GTTGCAGTGAGCCGAGATC | ACT |
| 7142642 | TGTTGTTTTAAGCTACTGAGTTT | ACT |
| 8006233 | AGGGTGTGTAATGTAACATTTC | ACT |
| 8007559 | GCCCTGCACTCCCACCCT | CGT |
| 8006156 | TCCCACCCTTGTACACTGC | ACT |
| 1468662 | CTCTGACTGAGGAGAGACC | ACT |
| 11627048 | CCGTGGAGGACCCCTGGA | ACG |
| 6574098 | GACCTCAGGTGATCCACCC | ACT |
| 12433760 | GCCAAGGTGGGCAGATCAC | ACG |
| 12433780 | GAAACCAGCCTGGCCAACA | ACG |
| 12434506 | GGGAAACACAGAAAGACCCTA | CGT |
| 12434673 | ATGGGTGTGAACGGTAGCTT | ACT |
| 12431400 | GCCATTTTAATGGGTGTGAAC | ACT |
| 12431384 | GTGGCTGTGCTTTTGGTTGC | ACG |
| 4903067 | GCTGCTAATGTACACAACAATG | ACG |
| 2332920 | GAGATGGGGTTTTCCCATGT | ACG |
| 2215591 | TTCAATAAAATGTACTCATTCAAA | ACT |
| 12433064 | GACCAGGAGTTCAAGACCAG | CGT |
| 12436263 | GACCAGCCTGGACAACATGA | ACT |
| 12433097 | TCACTGCAACCTCTGCGTC | ACG |
| 12433184 | GTGTGCATGCCACCACGC | CGT |
| 8015900 | TGTGACCTCAGCTCACTGC | CGT |
| 11296981 | AGATGTGTAGATGACTTACACT | CGT |
| 11344025 | AGATGTGTAGATGACTTACACT | CGT |
| 11464204 | CGAGAGCTCATCTCCACTAAA | CGT |
| 11441172 | GTGCCTGGCTAATTAAAAAAAAAA | CGT |
| 11381807 | CTCATCTCCACTAAATTTTTTTTTT | CGT |
| 10873251 | CCACCTTGGCCTCCCAAAG | ACG |
| 2109794 | AGCACTTTGGGAGGCCAAG | ACT |
| 10873252 | GCATGTGCTACCACGCCC | ACT |
| 4520784 | CCAGGTTCAAGTGATCCTCC | ACG |
| 2877820 | TGCCCTGTTCTGCACCTTTAAAA | CGT |
| 2877821 | CCCTGTTCTGCACCTTTAAA | CGT |
| 4569195 | AGGGAGAAAAAAATAAAAGGACA | ACT |
| 11628905 | GGGAGTGGGAGGAAGCCAA | ACT |
| 2191822 | AGGAAAGGAATGTCTGCCCC | ACT |
| 2191821 | ATGTGGGTTTGGACTGGGGCT | ACT |
| 11464689 | CGTTTTCTTTTTCTTTTTTTTTTTTT | ACT |
| 12431959 | GCTGAAGTAGGCGGATCAC | ACG |
| 4903068 | CTCTCTCACAGAGCACACTC | ACT |
| 1544579 | GACATGCATCAAAGCAGCTG | ACT |
| 7155879 | CCTTTTCGCTGAAAAGAGGG | CGT |
| 12433603 | GGAAGAAGCCCTCTTTTCAG | ACT |
| 11351432 | ACTCCATCTCAAAAAAAAAAAAAAA | ACT |
| 11448438 | CAAACCACTGTATAAGTCCAG | ACT |
| 4243643 | CTCAGCCTCCTGAGATGCT | ACG |
| 4140952 | CATGCTACAAGCAACCTTGG | ACT |
| 8005372 | AACAGTGGTTGAGTACCTGC | ACG |
| 8004109 | CATGACCCTGTACCCAGCAT | ACT |
| 8008398 | TCTATGAACCTGTTGAAGGCA | ACT |
| 8009692 | CTTCTCCTCCCCATAGCTCT | ACT |
| 2332921 | TGTCTCCAGGGTCTGGGG | ACT |
| 12050320 | CAGCAATCTATGCACAGAGAA | ACT |
| 12050323 | CAAAGGCTGAGAAAGACTGAA | ACT |
| 8010316 | AAATTTAACCATCATCTGCCAG | ACT |
| 7154293 | GGTCAACATGGTGAAACCCC | ACT |
| 12147969 | AAAATAAGCCTGGCGCACCT | ACG |
| 2215590 | CAGGGCCAGCCATGAACGT | ACG |
| 4265749 | GGATCATCCAAGTATGCTCC | ACG |
| 1004552 | TCTTGGCTCAGTGCTGC | ACG |
| 4307892 | GAGCAATGAACACCAATATCC | ACG |
| 12431973 | CTGAAGCAGGAGGATCGCTT | ACT |
| 12431975 | CGCTTGAGCCCAGGAGTTC | ACT |
| 767874 | CATTTGCCCTATCTGTAGTTC | ACT |
| 11628597 | CATCTCCCCGAGGCACCC | ACT |
| 10129371 | TCCAGTGATATGCTTCCCTC | ACT |
| 4903069 | GAACCTGGGAGGTGGAGGT | ACT |
| 4903070 | TGTTGGCCAGACTGGTCTC | ACT |
| 4903071 | GGGATCAGTAAACCTTTCCC | CGT |
| 11622224 | CTTCATGAAGGCCGCAGAC | ACT |
| 10459455 | CTCGACTCATGGCAACCTC | ACG |
| 9323577 | CTGGGCAACAGAGTGAGAC | ACG |
| 10624648 | CTTCCCTGACCCCCAAACAA | ACT |
| 3058953 | CTTCCCTGACCCCCAAACAA | ACT |
| 11158981 | ACCTCAAAACCTGACTATAGAA | ACT |
| 11158982 | CTCATCAAAAGTAAAATGGGAAAA | ACT |
| 11158983 | TTTTTGTTCATTGGCTAATTTCTT | CGT |
| 1860750 | CCTTAATCATGTTTATTTATTTATTT | CGT |
| 1860749 | TTAAGGATAAAGCAATCCAG | ACG |
| 1860748 | TCTTGGAGCCATATTTTATTTG | ACT |
| 1860747 | GACAGAGGAGAGCTCCCC | ACT |
| 11419679 | AGCCCAGTAGTAAGGAAAGAA | CGT |
| 8011777 | CAGAGTGAGACTCCGTCTCA | ACT |
| 6574099 | ATGTTAGCCAGGATGGTCTC | ACT |
| 8010957 | GATTATGAGCCACTGCACCC | ACT |
| 11626895 | GCCCATCTTCTTGGGTGTGT | ACG |
| 10151431 | CTGCCTCCTGGGTTCAAGC | ACT |
| 4903072 | GTGTGACAAGCCAATATTCCC | CGT |
| 4589489 | CCACACCATTACCAGGCCA | ACT |
| 9671327 | CCACTGTGCCCAGCCTAAA | CGT |
| 4899446 | GCTGGGCACAGTGGCTCA | ACG |
| 10144501 | AGATCATACCACTGCACTCC | CGT |
| 5809594 | GTGCGCACACACACACACA | ACG |
| 720317 | CATGTGTGTGTGTGTGCGC | ACT |
| 8014316 | CCCGGCATTCTCTAGCACC | ACG |
| 11158984 | GGGACGTTCAAAGGGGAGC | ACT |
| 6420906 | GTACAATGTACAAAATGTCCACT | ACG |
| 8004055 | CCCACAGACTCCTACGGG | CGT |
| 12434800 | TGTTGACTGCCTTACACACC | ACT |
| 4243644 | TTACCCTACAGCTGATTTTTTTT | CGT |
| 4899447 | CCTTGCGTGTGTGTGTGTGT | ACT |
| 4903073 | TATGCCTCAGCAAGCATGCA | ACG |
| 11848634 | TGCTGATTGTAAACAATGCACA | ACT |
| 4899448 | CTGCTCTTGACTAGTCTTAAAAA | ACT |
| 10131564 | CTCTGTCACTGACTGGCCC | ACT |
| 10134150 | AGAAGAAGCATTGGTCTGTTTA | ACT |
| 763388 | CACTCATGCCTCAAGCCAAT | ACT |
| 11845938 | TGAGGCATGAGTGATCAGCA | ACT |
| 11845946 | ACCTAAGTTTCCTGACATTCC | CGT |
| 11845915 | TACAATTCACCCAGCTCCTC | ACT |
| 10137463 | CCATCTGCCTGTCCTCCTG | ACT |
| 6574100 | CAAGAGCTGGAGTGATTTGTTT | CGT |
| 7140344 | ACATGCTAGGAAGTAGGCAAT | ACT |
| 10646889 | CACCTGGGTTTTTTTTTTTTTTTTT | ACT |
| 7146287 | TTGAACATGCAAAGTATTTCTGA | ACG |
| 10605948 | GCTTCCTCCCCCCCCCC | CGT |
| 5809595 | CACCATTTCTGTTTTTTTTTTTTTT | ACT |
| 1035099 | TTGGTCAACATCGCAGC | CGT |
| 7159877 | ACAAACCTCCACCTCCTGG | ACT |
| 7142579 | CATGTCACAGTTCTGAATAGAG | ACG |
| 12431762 | GAGCTAGGGGTCTGAATTAG | ACG |
| 12431764 | ACTTAAGGAGAGCTAGGGGT | ACG |
| 10647999 | CTTTCTTTCTTTCTCTTTCTTTCT | ACG |
| 6574101 | GGAGCTCAGTGGCACACGA | ACG |
| 6574102 | GAGCAAGTGGAAGATGAGAC | ACT |
| 1861162 | CGATGTGTAGAAAAGGGCAC | ACT |
| 12432972 | GGAGGCCGACACTGACCA | ACT |
| 10146134 | TTATACTTTTGATGGCTCCTAC | CGT |
| 10146616 | TCCTGACCATTCTACTGCCT | ACT |
| 10146769 | GGTCAGGAGGAGAGAGGGA | ACT |
| 8018936 | GGCAAGGACATAAAGCTTCAT | ACG |
| 10483849 | GCCTGGAGATTTCGTGGTC | ACG |
| 2160137 | GGGTACCTGGGAGTCAGAC | ACT |
| 2192595 | CTTGGGCATCCTAGTAGAGA | CGT |
| 2192594 | CGGATTTTCATGTCCTGGAAA | ACT |
| 11271695 | CTCCTGCCATGATTCTGAGG | CGT |
| 10747301 | GATTTCAGACCTACCTGGGC | ACT |
| 12050363 | GTACAGCCTCCCTCCTGC | ACT |
| 12050368 | GCCTGGAAAAGCTGCAGAGA | ACG |
| 12432949 | ACCCCATCAACAAGTGGGC | ACT |
| 7401375 | ACCATCTCACACCAGTTAGAA | CGT |
| 8019682 | ATGTTTTAGCGAAGAGACTGG | ACG |
| 8021248 | ATTTTCTCTTGCTGCTGCCAT | ACT |
| 11158985 | GTGAGGACACAGCCAAACC | CGT |
| 10483850 | GGAAGGAAGTGGCCAGCAC | ACT |
| 8010875 | CTCATTTTTCCCTTCTGTTCAC | ACT |
| 11626844 | CCTGAGAGAAGCTGCTTCAC | ACT |
| 982972 | AAGCACTGAAGGGGCACAAA | ACT |
| 7161198 | ATAGAGATACCAGCGTATCATT | ACT |
| 7160347 | TTAGCTTTATTTATACTGGAGGA | ACG |
| 8007139 | GATTCCATCTCCAAAAAAAAAAAA | ACT |
| 8014483 | ACTCTCCAAGGCAACTCACT | ACG |
| 12437072 | CCAACGTCACAGTCCTAAGT | ACT |
| 8004767 | GCACCGCGTTGCCGCCC | ACT |
| 12588830 | TGCCCTGCCAAAAAACAAGG | ACT |
| 7158449 | CCCAGGCTGGAGTGCAGTA | ACT |
| 6574103 | GGCTGGCAACCAAGACATG | ACG |
| 8020478 | GGTGGCTTACGCCTGTAATC | ACG |
| 4903077 | ATTACAGGCATGAGCCTAGC | ACG |
| 8012359 | CGGAGAGAAACTTTGTATGCA | ACG |
| 4899449 | AATGGCTAAAATGGTACACTGT | ACT |
| 10690289 | GTGATCTGGGACACAGAACTT | ACG |
| 6574104 | CTGGCACATGTCTAATCCCC | CGT |
| 2110552 | TCCGGTTACTGGTGTTTCAC | ACT |
| 8008256 | GGGGAGAGATGAGGTGTTG | ACG |
| 759283 | CAGGAATGTGACCCCCACC | CGT |
| 4999177 | AACACCCTGTCTCAAAAAATAAT | ACT |
| 2333006 | CATTATGTTTCCCAGGTATGCA | ACT |
| 8006178 | TCTCTAAGCTTGTGTTCCCC | ACT |
| 11158986 | TACCGAACCCACAACTGATTT | ACT |
| 7150625 | GGCGGCTTAACAGTTCCAC | ACG |
| 8007768 | TACACGAGCAGACACACGC | ACT |
| 8007058 | GAGCGCCCTGCAAACTCC | ACT |
| DPF3-AA | CCCGTCGCTTCCCCTGAG | CGT |
| 2215901 | CTCTGGGCTTTGACAGCTC | ACG |
| 3814866 | GAAAAGGAGCTACCAGCGC | ACT |
| 3814864 | TGGAAGGCTGCCGTTTCGT | ACT |

Genetic Analysis of Allelotyping Results

[0395] Allelotyping results are shown for cases and controls in Table 44. The allele frequency for the A2 allele is noted in the fifth and sixth columns for breast cancer pools and control pools, respectively, where “A” is allele frequency. SNPs with blank allele frequencies were untyped.

TABLE 44

| | | | | | | | | Breast |
|---|---|---|---|---|---|---|---|---|
| | Position in | Chromo- | | | | | | Cancer |
| dbSNP | SEQ ID | some | A1/A2 | | | p- | | Associated |
| rs# | NO: 6 | Position | Allele | Case AF | Control AF | Value | OR | Allele |
| 11846274 | 207 | 71066357 | G/A | G = 0.001 | G = 0.002 | 0.897 | 3.28 | A |
| | | | | A = 0.999 | A = 0.998 | | | |
| 2526935 | 486 | 71066636 | T/G | T = 0.749 | T = 0.699 | 0.134 | 0.78 | T |
| | | | | G = 0.251 | G = 0.301 | | | |
| 929328 | 1745 | 71067895 | T/C | T = 0.559 | T = 0.53 | 0.372 | 0.89 | T |
| | | | | C = 0.441 | C = 0.470 | | | |
| 3742840 | 1922 | 71068072 | A/G | A = 0.999 | A = 0.998 | 0.935 | 0.68 | A |
| | | | | G = 0.001 | G = 0.002 | | | |
| 9671739 | 2190 | 71068340 | A/C | A = 0.001 | A = 0.001 | 0.963 | 0.49 | A |
| | | | | C = 0.999 | C = 0.999 | | | |
| 8006208 | 2590 | 71068740 | C/T | C = 1.000 | C = 1.000 | 0.991 | 0.31 | C |
| | | | | T = 0.000 | T = 0.000 | | | |
| 8006230 | 2637 | 71068787 | T/C | T = 0.002 | T = 0.003 | 0.924 | 1.99 | C |
| | | | | C = 0.998 | C = 0.997 | | | |
| 8007836 | 2804 | 71068954 | C/T | C = 0.001 | C = 0.001 | 0.976 | 0.60 | C |
| | | | | T = 0.999 | T = 0.999 | | | |
| 8006889 | 2806 | 71068956 | G/A | G = 1.000 | G = 1.000 | 1 | | |
| | | | | A = 0 | A = 0 | | | |
| 8010823 | 2895 | 71069045 | C/T | C = 1.000 | C = 0.999 | 0.911 | 0.26 | C |
| | | | | T = 0.000 | T = 0.001 | | | |
| 8011029 | 3109 | 71069259 | A/T | A = 0.997 | A = 0.999 | 0.858 | 1.89 | T |
| | | | | T = 0.003 | T = 0.001 | | | |
| 10649920 | 3185 | 71069335 | —/AA | — = 0.579 | — = 0.575 | 0.881 | 0.98 | — |
| | | | | AA = 0.421 | AA = 0.425 | | | |
| 2803956 | 3355 | 71069505 | A/G | A = 0.621 | A = 0.571 | 0.118 | 0.81 | A |
| | | | | G = 0.379 | G = 0.429 | | | |
| 2803957 | 3642 | 71069792 | C/T | C = 0.732 | C = 0.758 | 0.382 | 1.15 | T |
| | | | | T = 0.268 | T = 0.242 | | | |
| 2526934 | 3805 | 71069955 | T/C | T = 1.000 | T = 1.000 | 0.98 | | C |
| | | | | C = 0.000 | C = 0 | | | |
| 9671558 | 4236 | 71070386 | A/G | A = 0.001 | A = 0.001 | 0.951 | 0.36 | A |
| | | | | G = 0.999 | G = 0.999 | | | |
| 2526933 | 4331 | 71070481 | C/G | C = 0.699 | C = 0.705 | 0.85 | 1.03 | G |
| | | | | G = 0.301 | G = 0.295 | | | |
| 2803959 | 4509 | 71070659 | T/C | T = 0.565 | T = 0.558 | 0.829 | 0.97 | T |
| | | | | C = 0.435 | C = 0.442 | | | |
| 2526932 | 4959 | 71071109 | C/T | C = 0.559 | C = 0.6 | 0.226 | 1.18 | T |
| | | | | T = 0.441 | T = 0.400 | | | |
| 2803960 | 5009 | 71071159 | G/A | G = 0.002 | G = 0.002 | 0.952 | 1.47 | A |
| | | | | A = 0.998 | A = 0.998 | | | |
| 12434675 | 5676 | 71071826 | G/A | G = 0.71 | G = 0.682 | 0.344 | 0.88 | G |
| | | | | A = 0.290 | A = 0.318 | | | |
| 4899435 | 6507 | 71072657 | G/C | G = 0.002 | G = 0.003 | 0.932 | 1.52 | C |
| | | | | C = 0.998 | C = 0.997 | | | |
| 2526931 | 6695 | 71072845 | C/T | C = 0 | C = 0.001 | 0.906 | | T |
| | | | | T = 1.000 | T = 0.999 | | | |
| 2803961 | 6717 | 71072867 | T/C | T = 0.509 | T = 0.494 | 0.647 | 0.94 | T |
| | | | | C = 0.491 | C = 0.506 | | | |
| 2803962 | 7131 | 71073281 | C/T | C = 0.443 | C = 0.426 | 0.598 | 0.93 | C |
| | | | | T = 0.557 | T = 0.574 | | | |
| 12590634 | 7873 | 71074023 | C/T | C = 0.639 | C = 0.612 | 0.393 | 0.89 | C |
| | | | | T = 0.361 | T = 0.388 | | | |
| 11327712 | 7922 | 71074072 | —/C | — = 0 | — = 0 | 1 | | |
| | | | | C = 1.000 | C = 1.000 | | | |
| 2803963 | 8652 | 71074802 | A/G | A = 0.525 | A = 0.577 | 0.109 | 1.23 | G |
| | | | | G = 0.475 | G = 0.423 | | | |
| 11844834 | 9817 | 71075967 | G/A | G = 0.998 | G = 0.988 | 0.309 | 0.23 | G |
| | | | | A = 0.002 | A = 0.012 | | | |
| 11320415 | 10272 | 71076422 | —/A | — = 0 | — = 0 | 1 | | |
| | | | | A = 1.000 | A = 1.000 | | | |
| 8012752 | 10823 | 71076973 | T/C | T = 0.002 | T = 0.002 | 0.925 | 1.65 | C |
| | | | | C = 0.998 | C = 0.998 | | | |
| 11623878 | 11465 | 71077615 | T/C | T = 0.127 | T = 0.104 | 0.264 | 0.79 | T |
| | | | | C = 0.873 | C = 0.896 | | | |
| 11623926 | 11639 | 71077789 | C/T | C = 0.975 | C = 0.98 | 0.716 | 1.21 | T |
| | | | | T = 0.025 | T = 0.020 | | | |
| 12434442 | 12177 | 71078327 | T/C | T = 0.354 | T = 0.412 | 0.0584 | 1.28 | C |
| | | | | C = 0.646 | C = 0.588 | | | |
| 2526930 | 12604 | 71078754 | G/A | G = 0.929 | G = 0.911 | 0.32 | 0.78 | G |
| | | | | A = 0.071 | A = 0.089 | | | |
| 12435306 | 13363 | 71079513 | G/A | G = 0.425 | G = 0.455 | 0.354 | 1.13 | A |
| | | | | A = 0.575 | A = 0.545 | | | |
| 10144028 | 13454 | 71079604 | C/G | C = 1.000 | C = 1.000 | 0.97 | 2.29 | G |
| | | | | G = 0.000 | G = 0.000 | | | |
| 4899436 | 13540 | 71079690 | C/T | C = 0.999 | C = 0.999 | 0.966 | 0.75 | C |
| | | | | T = 0.001 | T = 0.001 | | | |
| 7140593 | 13923 | 71080073 | A/C | A = 1.000 | A = 0.999 | 0.981 | 0.76 | A |
| | | | | C = 0.000 | C = 0.001 | | | |
| 2107687 | 14507 | 71080657 | T/C | T = 0.999 | T = 1.000 | 0.926 | 3.80 | C |
| | | | | C = 0.001 | C = 0.000 | | | |
| 991882 | 16550 | 71082700 | C/A | C = 0.001 | C = 0.002 | 0.875 | 3.36 | A |
| | | | | A = 0.999 | A = 0.998 | | | |
| 3327 | 17641 | 71083791 | C/T | C = 0.003 | C = 0.154 | 2.36E−07 | 60.70 | T |
| | | | | T = 0.997 | T = 0.846 | | | |
| 2526928 | 18903 | 71085053 | T/C | T = 1.000 | T = 1.000 | 0.994 | 0.90 | T |
| | | | | C = 0.000 | C = 0.000 | | | |
| 7401336 | 19395 | 71085545 | A/G | A = 1.000 | A = 1.000 | 0.955 | 2.83 | G |
| | | | | G = 0.000 | G = 0.000 | | | |
| 2526926 | 19527 | 71085677 | T/A | T = 0.953 | T = 0.9 | 0.00403 | 0.45 | T |
| | | | | A = 0.047 | A = 0.100 | | | |
| 994760 | 20369 | 71086519 | T/C | T = 1.000 | T = 1.000 | 0.949 | 0.36 | T |
| | | | | C = 0.000 | C = 0.000 | | | |
| 994759 | 20505 | 71086655 | G/T | G = 0.469 | G = 0.511 | 0.181 | 1.18 | T |
| | | | | T = 0.531 | T = 0.489 | | | |
| 994758 | 20562 | 71086712 | C/T | C = 0.916 | C = 0.884 | 0.118 | 0.70 | C |
| | | | | T = 0.084 | T = 0.116 | | | |
| 11848404 | 20907 | 71087057 | A/T | A = 0.002 | A = 0.008 | 0.553 | 4.19 | T |
| | | | | T = 0.998 | T = 0.992 | | | |
| 2526925 | 20949 | 71087099 | C/T | C = 0.999 | C = 0.998 | 0.881 | 0.46 | C |
| | | | | T = 0.001 | T = 0.002 | | | |
| 11844236 | 21278 | 71087428 | T/G | T = 0.008 | T = 0.036 | 0.0996 | 4.84 | G |
| | | | | G = 0.992 | G = 0.964 | | | |
| 2526924 | 21314 | 71087464 | C/T | C = 0.005 | C = 0.002 | 0.818 | 0.36 | C |
| | | | | T = 0.995 | T = 0.998 | | | |
| 2803965 | 21905 | 71088055 | C/G | C = 0.767 | C = 0.781 | 0.619 | 1.08 | G |
| | | | | G = 0.233 | G = 0.219 | | | |
| 2526923 | 22252 | 71088402 | G/C | G = 0.179 | G = 0.189 | 0.75 | 1.07 | C |
| | | | | C = 0.821 | C = 0.811 | | | |
| 7152467 | 22941 | 71089091 | C/T | C = 0.999 | C = 0.998 | 0.941 | 0.73 | C |
| | | | | T = 0.001 | T = 0.002 | | | |
| 11623462 | 23542 | 71089692 | C/G | C = 0.205 | C = 0.168 | 0.173 | 0.78 | C |
| | | | | G = 0.795 | G = 0.832 | | | |
| 2803966 | 24677 | 71090827 | C/T | C = 0.44 | C = 0.42 | 0.522 | 0.92 | C |
| | | | | T = 0.560 | T = 0.580 | | | |
| 2526922 | 25009 | 71091159 | T/C | T = 0.543 | T = 0.534 | 0.777 | 0.96 | T |
| | | | | C = 0.457 | C = 0.466 | | | |
| 2526920 | 25618 | 71091768 | C/T | C = 0.604 | C = 0.616 | 0.715 | 1.05 | T |
| | | | | T = 0.396 | T = 0.384 | | | |
| 11848135 | 26082 | 71092232 | T/C | T = 1.000 | T = 1.000 | 1 | | |
| | | | | C = 0 | C = 0 | | | |
| 11629210 | 26136 | 71092286 | C/A | C = 1.000 | C = 1.000 | 0.984 | 0.59 | C |
| | | | | A = 0.000 | A = 0.000 | | | |
| 2803967 | 26491 | 71092641 | C/T | C = 0.001 | C = 0.001 | 0.989 | 0.88 | C |
| | | | | T = 0.999 | T = 0.999 | | | |
| 16455 | 28873 | 71095023 | —/GCC | — = 0.725 | — = 0.745 | 0.498 | 1.11 | GCC |
| | | | | GCC = 0.275 | GCC = 0.255 | | | |
| 757655 | 28886 | 71095036 | G/A | G = 0.613 | G = 0.665 | 0.106 | 1.25 | A |
| | | | | A = 0.387 | A = 0.335 | | | |
| 5809581 | 29105 | 71095255 | —/TCTGTAAT | — = 0.005 | — = 0.002 | 0.761 | 0.39 | — |
| | | | | TCTGTAAT = | TCTGTAAT = | | | |
| | | | | 0.995 | 0.998 | | | |
| 3057139 | 29106 | 71095256 | —/CTGTAATT | — = 0.005 | — = 0.004 | 0.854 | 0.67 | — |
| | | | | CTGTAATT = | CTGTAATT = | | | |
| | | | | 0.995 | 0.996 | | | |
| 2247658 | 29572 | 71095722 | C/T | C = 0.801 | C = 0.797 | 0.882 | 0.98 | C |
| | | | | T = 0.199 | T = 0.203 | | | |
| 11625609 | 30640 | 71096790 | C/T | C = 0.999 | C = 1.000 | 0.891 | 3.18 | T |
| | | | | T = 0.001 | T = 0.000 | | | |
| 8005580 | 30801 | 71096951 | A/G | A = 0.998 | A = 0.998 | 0.966 | 0.84 | A |
| | | | | G = 0.002 | G = 0.002 | | | |
| 8010472 | 30962 | 71097112 | G/A | G = 1.000 | G = 1.000 | 0.917 | 0.18 | G |
| | | | | A = 0.000 | A = 0.000 | | | |
| 2526919 | 31662 | 71097812 | T/C | T = 0.557 | T = 0.539 | 0.582 | 0.93 | T |
| | | | | C = 0.443 | C = 0.461 | | | |
| 2803968 | 34374 | 71100524 | G/A | G = 0.359 | G = 0.308 | 0.0874 | 0.79 | G |
| | | | | A = 0.641 | A = 0.692 | | | |
| 11623943 | 34494 | 71100644 | T/C | T = 0.001 | T = 0.002 | 0.903 | 2.17 | C |
| | | | | C = 0.999 | C = 0.998 | | | |
| 11623946 | 34501 | 71100651 | G/C | G = 0.002 | G = 0.002 | 0.967 | 0.77 | G |
| | | | | C = 0.998 | C = 0.998 | | | |
| 1557926 | 34544 | 71100694 | C/G | C = 0.646 | C = 0.658 | 0.692 | 1.05 | G |
| | | | | G = 0.354 | G = 0.342 | | | |
| 12434611 | 35493 | 71101643 | A/G | A = 0.486 | A = 0.528 | 0.193 | 1.18 | G |
| | | | | G = 0.514 | G = 0.472 | | | |
| 2526918 | 35594 | 71101744 | T/G | T = 0.998 | T = 0.998 | 0.992 | 1.04 | G |
| | | | | G = 0.002 | G = 0.002 | | | |
| 5809582 | 35901 | 71102051 | —/T | — = 0.93 | — = 0.925 | 0.784 | 0.93 | — |
| | | | | T = 0.070 | T = 0.075 | | | |
| 8008279 | 35940 | 71102090 | C/G | C = 0.835 | C = 0.852 | 0.505 | 1.14 | G |
| | | | | G = 0.165 | G = 0.148 | | | |
| 2803969 | 36064 | 71102214 | T/C | T = 0.993 | T = 0.991 | 0.863 | 0.76 | T |
| | | | | C = 0.007 | C = 0.009 | | | |
| 2526917 | 36105 | 71102255 | T/G | T = 1.000 | T = 1.000 | 0.951 | 3.23 | G |
| | | | | G = 0.000 | G = 0.000 | | | |
| 8008774 | 36160 | 71102310 | T/C | T = 0.375 | T = 0.338 | 0.219 | 0.85 | T |
| | | | | C = 0.625 | C = 0.662 | | | |
| 2803970 | 36161 | 71102311 | T/G | T = 1.000 | T = 1.000 | 0.991 | 0.82 | T |
| | | | | G = 0.000 | G = 0.000 | | | |
| 8010255 | 36308 | 71102458 | T/C | T = 0.778 | T = 0.812 | 0.2 | 1.23 | C |
| | | | | C = 0.222 | C = 0.188 | | | |
| 2997642 | 36335 | 71102485 | A/G | A = 1.000 | A = 1.000 | 0.971 | 2.42 | G |
| | | | | G = 0.000 | G = 0.000 | | | |
| 2803971 | 36365 | 71102515 | G/A | G = 0.352 | G = 0.315 | 0.223 | 0.85 | G |
| | | | | A = 0.648 | A = 0.685 | | | |
| 11313760 | 36488 | 71102638 | —/G | — = 0.369 | — = 0.327 | 0.163 | 0.83 | — |
| | | | | G = 0.631 | G = 0.673 | | | |
| 2803972 | 36576 | 71102726 | G/T | G = 0.003 | G = 0.005 | 0.814 | 1.84 | T |
| | | | | T = 0.997 | T = 0.995 | | | |
| 4903038 | 36641 | 71102791 | A/G | A = 0.001 | A = 0.002 | 0.887 | 4.87 | G |
| | | | | G = 0.999 | G = 0.998 | | | |
| 2526916 | 36933 | 71103083 | A/T | A = 0.998 | A = | | | |
| | | | | T = 0.002 | T = | | | |
| 4903040 | 36955 | 71103105 | C/T | C = 1.000 | C = 1.000 | 0.953 | 0.51 | C |
| | | | | T = 0.000 | T = 0.000 | | | |
| 2803974 | 36967 | 71103117 | T/A | T = 0.986 | T = 0.998 | 0.457 | 5.99 | A |
| | | | | A = 0.014 | A = 0.002 | | | |
| 2803975 | 37243 | 71103393 | C/T | C = 0.264 | C = 0.235 | 0.365 | 0.86 | C |
| | | | | T = 0.736 | T = 0.765 | | | |
| 2803976 | 38329 | 71104479 | C/T | C = 0.003 | C = 0.002 | 0.865 | 0.43 | C |
| | | | | T = 0.997 | T = 0.998 | | | |
| 2803977 | 38367 | 71104517 | T/G | T = 0.007 | T = 0.002 | 0.718 | 0.31 | T |
| | | | | G = 0.993 | G = 0.998 | | | |
| 10139909 | 38476 | 71104626 | C/T | C = 0.001 | C = 0.001 | 0.994 | 0.94 | C |
| | | | | T = 0.999 | T = 0.999 | | | |
| 722945 | 38510 | 71104660 | G/A | G = 0.751 | G = 0.781 | 0.283 | 1.18 | A |
| | | | | A = 0.249 | A = 0.219 | | | |
| 917069 | 39396 | 71105546 | A/G | A = 0.809 | A = 0.819 | 0.693 | 1.07 | G |
| | | | | G = 0.191 | G = 0.181 | | | |
| 2803978 | 39703 | 71105853 | C/A | C = 0.004 | C = 0.002 | 0.869 | 0.56 | C |
| | | | | A = 0.996 | A = 0.998 | | | |
| 2332890 | 39801 | 71105951 | A/G | A = 0.001 | A = 0.002 | 0.96 | 2.01 | G |
| | | | | G = 0.999 | G = 0.998 | | | |
| 1989638 | 40078 | 71106228 | T/C | T = 0.333 | T = 0.303 | 0.309 | 0.87 | T |
| | | | | C = 0.667 | C = 0.697 | | | |
| 10679174 | 40260 | 71106410 | GGG/— | GGG = 0.195 | GGG = 0.173 | 0.373 | 0.86 | GGG |
| | | | | — = 0.805 | — = 0.827 | | | |
| 2526915 | 40513 | 71106663 | C/T | C = 0.364 | C = 0.343 | 0.498 | 0.91 | C |
| | | | | T = 0.636 | T = 0.657 | | | |
| 2526914 | 40889 | 71107039 | T/C | T = 0.106 | T = 0.038 | 0.000287 | 0.33 | T |
| | | | | C = 0.894 | C = 0.962 | | | |
| 11158964 | 41091 | 71107241 | G/A | G = 1.000 | G = 1.000 | 1 | | |
| | | | | A = 0 | A = 0 | | | |
| 11158965 | 41872 | 71108022 | A/G | A = 0.999 | A = 0.999 | 0.962 | 1.26 | G |
| | | | | G = 0.001 | G = 0.001 | | | |
| 740081 | 42112 | 71108262 | A/G | A = 0.468 | A = 0.441 | 0.405 | 0.90 | A |
| | | | | G = 0.532 | G = 0.559 | | | |
| 740080 | 42292 | 71108442 | T/G | T = 1.000 | T = 1.000 | 0.976 | | G |
| | | | | G = 0.000 | G = 0 | | | |
| 10140582 | 42373 | 71108523 | T/C | T = 0.001 | T = 0 | 0.931 | 0.00 | T |
| | | | | C = 0.999 | C = 1.000 | | | |
| 2526913 | 44877 | 71111027 | A/G | A = 0.192 | A = 0.128 | 0.0186 | 0.62 | A |
| | | | | G = 0.808 | G = 0.872 | | | |
| 4899437 | 45124 | 71111274 | C/G | C = 0.649 | C = 0.621 | 0.376 | 0.89 | C |
| | | | | G = 0.351 | G = 0.379 | | | |
| 10145678 | 45831 | 71111981 | T/C | T = 0.998 | T = 0.996 | 0.738 | 0.42 | T |
| | | | | C = 0.002 | C = 0.004 | | | |
| 2107686 | 46030 | 71112180 | T/C | T = 0.001 | T = 0.002 | 0.957 | 1.97 | C |
| | | | | C = 0.999 | C = 0.998 | | | |
| 2107685 | 46270 | 71112420 | T/C | T = 0.985 | T = 0.998 | 0.338 | 7.09 | C |
| | | | | C = 0.015 | C = 0.002 | | | |
| 2107684 | 46309 | 71112459 | G/A | G = 0.678 | G = 0.637 | 0.176 | 0.84 | G |
| | | | | A = 0.322 | A = 0.363 | | | |
| 7154188 | 46545 | 71112695 | C/G | C = 1.000 | C = 0.994 | 0.8 | 0.00 | C |
| | | | | G = 0 | G = 0.006 | | | |
| 4903041 | 47162 | 71113312 | C/T | C = 0.655 | C = 0.602 | 0.099 | 0.80 | C |
| | | | | T = 0.345 | T = 0.398 | | | |
| 7159637 | 47267 | 71113417 | T/C | T = 0.004 | T = 0.005 | 0.875 | 1.54 | C |
| | | | | C = 0.996 | C = 0.995 | | | |
| 6574089 | 49077 | 71115227 | A/G | A = 1.000 | A = 0.999 | 0.912 | 0.15 | A |
| | | | | G = 0.000 | G = 0.001 | | | |
| 12589753 | 49377 | 71115527 | A/G | A = 0 | A = 0.001 | 0.935 | | G |
| | | | | G = 1.000 | G = 0.999 | | | |
| 4899438 | 50126 | 71116276 | G/C | G = 0.001 | G = 0.001 | 0.983 | 0.73 | G |
| | | | | C = 0.999 | C = 0.999 | | | |
| 4903042 | 50385 | 71116535 | G/T | G = 1.000 | G = 1.000 | 0.936 | 6.18 | T |
| | | | | T = 0.000 | T = 0.000 | | | |
| 4903043 | 50403 | 71116553 | A/T | A = 0.001 | A = 0 | 0.977 | 0.00 | A |
| | | | | T = 0.999 | T = 1.000 | | | |
| 2803980 | 50422 | 71116572 | G/A | G = 0.478 | G = 0.511 | 0.295 | 1.14 | A |
| | | | | A = 0.522 | A = 0.489 | | | |
| 10483848 | 50893 | 71117043 | T/A | T = 0.001 | T = 0.001 | 0.996 | 0.95 | T |
| | | | | A = 0.999 | A = 0.999 | | | |
| 2240344 | 52031 | 71118181 | G/C | G = 0.664 | G = 0.636 | 0.364 | 0.88 | G |
| | | | | C = 0.336 | C = 0.364 | | | |
| 2286068 | 52245 | 71118395 | A/G | A = 0.639 | A = 0.618 | 0.52 | 0.92 | A |
| | | | | G = 0.361 | G = 0.382 | | | |
| 11339669 | 52594 | 71118744 | —/G | — = 0.001 | — = 0 | 0.944 | 0.00 | — |
| | | | | G = 0.999 | G = 1.000 | | | |
| 3854 | 52874 | 71119024 | A/G | A = 0.619 | A = 0.577 | 0.212 | 0.84 | A |
| | | | | G = 0.381 | G = 0.423 | | | |
| 11463 | 53011 | 71119161 | T/G | T = 0.59 | T = 0.591 | 0.963 | 1.01 | G |
| | | | | G = 0.410 | G = 0.409 | | | |
| 1383 | 53656 | 71119806 | A/T | A = 0.863 | A = 0.829 | 0.15 | 0.77 | A |
| | | | | T = 0.137 | T = 0.171 | | | |
| 1381 | 53662 | 71119812 | C/G | C = 0.001 | C = 0.001 | 0.966 | 0.18 | C |
| | | | | G = 0.999 | G = 0.999 | | | |
| 1377 | 53711 | 71119861 | T/C | T = 1.000 | T = 1.000 | 0.993 | 0.91 | T |
| | | | | C = 0.000 | C = 0.000 | | | |
| 11158966 | 53798 | 71119948 | A/G | A = 0 | A = 0.001 | 0.963 | | G |
| | | | | G = 1.000 | G = 0.999 | | | |
| 11158967 | 53840 | 71119990 | A/G | A = 0 | A = 0.001 | 0.963 | | G |
| | | | | G = 1.000 | G = 0.999 | | | |
| 11158968 | 53873 | 71120023 | C/T | C = 1.000 | C = 1.000 | 0.968 | 0.00 | C |
| | | | | T = 0 | T = 0.000 | | | |
| 11158969 | 53884 | 71120034 | A/G | A = 0 | A = 0.001 | 0.936 | | G |
| | | | | G = 1.000 | G = 0.999 | | | |
| 11158970 | 53937 | 71120087 | A/G | A = 0 | A = 0.001 | 0.979 | | G |
| | | | | G = 1.000 | G = 0.999 | | | |
| 11158971 | 54032 | 71120182 | G/A | G = 1.000 | G = 0.999 | 0.904 | 0.49 | G |
| | | | | A = 0.000 | A = 0.001 | | | |
| 11849782 | 54352 | 71120502 | C/G | C = 0.503 | C = 0.527 | 0.446 | 1.10 | G |
| | | | | G = 0.497 | G = 0.473 | | | |
| 10137616 | 55430 | 71121580 | C/T | C = 0.46 | C = 0.473 | 0.697 | 1.05 | T |
| | | | | T = 0.540 | T = 0.527 | | | |
| 757572 | 55920 | 71122070 | G/A | G = 0.614 | G = 0.579 | 0.27 | 0.87 | G |
| | | | | A = 0.386 | A = 0.421 | | | |
| 10140566 | 56081 | 71122231 | G/T | G = 0.493 | G = 0.517 | 0.464 | 1.10 | T |
| | | | | T = 0.507 | T = 0.483 | | | |
| 2023480 | 56227 | 71122377 | A/T | A = 0.984 | A = 0.999 | 0.282 | 13.67 | T |
| | | | | T = 0.016 | T = 0.001 | | | |
| 2526911 | 57350 | 71123500 | T/A | T = 0.029 | T = 0.008 | 0.322 | 0.27 | T |
| | | | | A = 0.971 | A = 0.992 | | | |
| 4903044 | 57493 | 71123643 | C/T | C = 0.603 | C = 0.566 | 0.239 | 0.86 | C |
| | | | | T = 0.397 | T = 0.434 | | | |
| 11845162 | 57682 | 71123832 | G/C | G = 1.000 | G = 1.000 | 1 | | |
| | | | | C = 0 | C = 0 | | | |
| 12147210 | 58092 | 71124242 | C/T | C = 1.000 | C = 0.996 | 0.771 | 0.18 | C |
| | | | | T = 0.000 | T = 0.004 | | | |
| 2997643 | 58731 | 71124881 | G/T | G = 1.000 | G = 1.000 | 0.946 | 0.00 | G |
| | | | | T = 0 | T = 0.000 | | | |
| 2997644 | 58826 | 71124976 | A/T | A = 1.000 | A = 1.000 | 0.992 | 0.47 | A |
| | | | | T = 0.000 | T = 0.000 | | | |
| 3814867 | 60916 | 71127066 | T/C | T = 0.999 | T = 0.999 | 0.982 | 0.82 | T |
| | | | | C = 0.001 | C = 0.001 | | | |
| 2286067 | 62047 | 71128197 | A/G | A = 0.999 | A = 1.000 | 0.951 | 2.09 | G |
| | | | | G = 0.001 | G = 0.000 | | | |
| 1060570 | 62080 | 71128230 | T/G | T = 0.469 | T = 0.494 | 0.414 | 1.11 | G |
| | | | | G = 0.531 | G = 0.506 | | | |
| 2332891 | 62665 | 71128815 | C/G | C = 1.000 | C = 1.000 | 0.997 | 1.14 | G |
| | | | | G = 0.000 | G = 0.000 | | | |
| 2021736 | 62809 | 71128959 | G/A | G = 0.995 | G = 0.994 | 0.897 | 0.81 | G |
| | | | | A = 0.005 | A = 0.006 | | | |
| 7160830 | 63629 | 71129779 | T/C | T = 0.518 | T = 0.542 | 0.461 | 1.10 | C |
| | | | | C = 0.482 | C = 0.458 | | | |
| 2526909 | 65432 | 71131582 | A/G | A = 0.998 | A = 1.000 | 0.823 | 5.46 | G |
| | | | | G = 0.002 | G = 0.000 | | | |
| 7140963 | 65590 | 71131740 | G/C | G = 1.000 | G = 1.000 | 0.959 | 2.57 | C |
| | | | | C = 0.000 | C = 0.000 | | | |
| 10143667 | 65876 | 71132026 | A/G | A = 0.058 | A = 0.053 | 0.823 | 0.91 | A |
| | | | | G = 0.942 | G = 0.947 | | | |
| 2803981 | 67118 | 71133268 | T/C | T = 0.685 | T = 0.686 | 0.96 | 1.01 | C |
| | | | | C = 0.315 | C = 0.314 | | | |
| 768840 | 67348 | 71133498 | T/C | T = 0.964 | T = 0.958 | 0.79 | 0.86 | T |
| | | | | C = 0.036 | C = 0.042 | | | |
| 5809587 | 68230 | 71134380 | T/— | T = 0.724 | T = 0.69 | 0.245 | 0.85 | T |
| | | | | — = 0.276 | — = 0.310 | | | |
| 2023479 | 68262 | 71134412 | A/G | A = 0.001 | A = 0.001 | 0.998 | 0.94 | A |
| | | | | G = 0.999 | G = 0.999 | | | |
| 4903045 | 68912 | 71135062 | T/C | T = 0.464 | T = 0.492 | 0.395 | 1.12 | C |
| | | | | C = 0.536 | C = 0.508 | | | |
| 4903046 | 69799 | 71135949 | A/G | A = 0.811 | A = 0.825 | 0.583 | 1.10 | G |
| | | | | G = 0.189 | G = 0.175 | | | |
| 5809588 | 70027 | 71136177 | —/G | — = 0.001 | — = 0.001 | 0.971 | 0.57 | — |
| | | | | G = 0.999 | G = 0.999 | | | |
| 10220555 | 73335 | 71139485 | G/A | G = 0.673 | G = 0.635 | 0.21 | 0.85 | G |
| | | | | A = 0.327 | A = 0.365 | | | |
| 2906132 | 74093 | 71140243 | G/A | G = 0.542 | G = 0.513 | 0.356 | 0.89 | G |
| | | | | A = 0.458 | A = 0.487 | | | |
| 11848482 | 74114 | 71140264 | T/G | T = 1.000 | T = 1.000 | 1 | | |
| | | | | G = 0 | G = 0 | | | |
| 10129954 | 74592 | 71140742 | T/C | T = 0.499 | T = 0.538 | 0.227 | 1.17 | C |
| | | | | C = 0.501 | C = 0.462 | | | |
| 2526921 | 75061 | 71141211 | C/T | C = 0.027 | C = 0.002 | 0.0158 | 0.05 | C |
| | | | | T = 0.973 | T = 0.998 | | | |
| 4903047 | 75683 | 71141833 | G/T | G = 0.48 | G = 0.493 | 0.708 | 1.05 | T |
| | | | | T = 0.520 | T = 0.507 | | | |
| 11846357 | 75857 | 71142007 | A/G | A = 1.000 | A = 0.999 | 0.91 | 0.31 | A |
| | | | | G = 0.000 | G = 0.001 | | | |
| 10136385 | 76457 | 71142607 | G/C | G = 0.515 | G = 0.533 | 0.583 | 1.07 | C |
| | | | | C = 0.485 | C = 0.467 | | | |
| 12588242 | 77130 | 71143280 | T/A | T = 0.001 | T = 0.001 | 0.978 | 0.61 | T |
| | | | | A = 0.999 | A = 0.999 | | | |
| 11621517 | 77947 | 71144097 | C/T | C = 0 | C = 0.002 | 0.912 | | T |
| | | | | T = 1.000 | T = 0.998 | | | |
| 2526910 | 78338 | 71144488 | C/T | C = 0.622 | C = 0.598 | 0.443 | 0.90 | C |
| | | | | T = 0.378 | T = 0.402 | | | |
| 2526941 | 79626 | 71145776 | A/G | A = 0.982 | A = 0.996 | 0.276 | 4.02 | G |
| | | | | G = 0.018 | G = 0.004 | | | |
| 2803944 | 80497 | 71146647 | G/A | G = 0.615 | G = 0.575 | 0.227 | 0.85 | G |
| | | | | A = 0.385 | A = 0.425 | | | |
| 12436770 | 80578 | 71146728 | A/G | A = 0.033 | A = 0.031 | 0.908 | 0.93 | A |
| | | | | G = 0.967 | G = 0.969 | | | |
| 10220279 | 81171 | 71147321 | C/A | C = 0.744 | C = 0.678 | 0.0671 | 0.72 | 0 |
| | | | | A = 0.256 | A = 0.322 | | | |
| 10220280 | 81243 | 71147393 | G/C | G = 0.001 | G = 0.003 | 0.833 | 4.04 | C |
| | | | | C = 0.999 | C = 0.997 | | | |
| 11844112 | 81321 | 71147471 | A/C | A = 0.001 | A = 0.002 | 0.924 | 2.92 | 0 |
| | | | | C = 0.999 | C = 0.998 | | | |
| 12432455 | 82634 | 71148784 | G/C | G = 0.57 | G = 0.575 | 0.877 | 1.02 | 0 |
| | | | | C = 0.430 | C = 0.425 | | | |
| 8015338 | 83269 | 71149419 | G/A | G = 1.000 | G = 0.999 | 0.891 | 0.00 | G |
| | | | | A = 0 | A = 0.001 | | | |
| 3832969 | 83514 | 71149664 | CAGC/— | CAGC = 0.003 | CAGC = 0.004 | 0.965 | 1.12 | — |
| | | | | — = 0.997 | — = 0.996 | | | |
| 9671972 | 85367 | 71151517 | A/G | A = 1.000 | A = 1.000 | 0.974 | 0.49 | A |
| | | | | G = 0.000 | G = 0.000 | | | |
| 9671975 | 85423 | 71151573 | C/T | C = 0.998 | C = 0.998 | 0.95 | 1.37 | T |
| | | | | T = 0.002 | T = 0.002 | | | |
| 7159986 | 86006 | 71152156 | T/C | T = 0.166 | T = 0.104 | 0.00774 | 0.58 | T |
| | | | | C = 0.834 | C = 0.896 | | | |
| 11848220 | 86515 | 71152665 | T/G | T = 1.000 | T = 1.000 | 0.978 | 0.00 | T |
| | | | | G = 0 | G = 0.000 | | | |
| 5016369 | 86936 | 71153086 | G/C | G = 0 | G = 0.001 | 0.99 | | C |
| | | | | C = 1.000 | C = 0.999 | | | |
| 1986423 | 87201 | 71153351 | A/G | A = 0.999 | A = 0.999 | 0.964 | 0.79 | A |
| | | | | G = 0.001 | G = 0.001 | | | |
| 2332909 | 87205 | 71153355 | C/T | C = 0.573 | C = 0.513 | 0.13 | 0.78 | C |
| | | | | T = 0.427 | T = 0.487 | | | |
| 8013337 | 88313 | 71154463 | G/A | G = 0.62 | G = 0.576 | 0.148 | 0.83 | G |
| | | | | A = 0.380 | A = 0.424 | | | |
| 11445680 | 89477 | 71155627 | —/G | — = 0.001 | — = 0.001 | 0.969 | 0.32 | — |
| | | | | G = 0.999 | G = 0.999 | | | |
| 4903048 | 90243 | 71156393 | T/C | T = 0.821 | T = | | | |
| | | | | C = 0.179 | C = | | | |
| 12434793 | 90735 | 71156885 | T/C | T = 0.688 | T = 0.651 | 0.223 | 0.85 | T |
| | | | | C = 0.312 | C = 0.349 | | | |
| 2332910 | 91990 | 71158140 | G/C | G = 0.003 | G = 0.002 | 0.893 | 0.49 | G |
| | | | | C = 0.997 | C = 0.998 | | | |
| 4410017 | 92879 | 71159029 | A/G | A = 0.003 | A = 0.001 | 0.872 | 0.33 | A |
| | | | | G = 0.997 | G = 0.999 | | | |
| 4577019 | 92880 | 71159030 | A/G | A = 1.000 | A = 0.999 | 0.917 | 0.00 | A |
| | | | | G = 0 | G = 0.001 | | | |
| 2332911 | 93386 | 71159536 | A/G | A = 0.996 | A = 0.995 | 0.97 | 0.90 | A |
| | | | | G = 0.004 | G = 0.005 | | | |
| 4996747 | 93397 | 71159547 | T/G | T = 0.999 | T = 0.999 | 0.984 | 0.84 | T |
| | | | | G = 0.001 | G = 0.001 | | | |
| 10140820 | 93680 | 71159830 | G/T | G = 0.002 | G = 0.001 | 0.94 | 0.46 | G |
| | | | | T = 0.998 | T = 0.999 | | | |
| 12431623 | 95585 | 71161735 | T/C | T = 0.995 | T = 0.995 | 0.976 | 1.05 | C |
| | | | | C = 0.005 | C = 0.005 | | | |
| 6574090 | 95818 | 71161968 | G/T | G = 0.001 | G = 0.001 | 0.966 | 2.92 | T |
| | | | | T = 0.999 | T = 0.999 | | | |
| 8008750 | 96203 | 71162353 | C/G | C = 0.576 | C = 0.579 | 0.92 | 1.01 | G |
| | | | | G = 0.424 | G = 0.421 | | | |
| 11627420 | 96911 | 71163061 | G/A | G = 0.986 | G = 0.988 | 0.878 | 1.14 | A |
| | | | | A = 0.014 | A = 0.012 | | | |
| 10150185 | 98014 | 71164164 | A/G | A = 0.934 | A = 0.931 | 0.877 | 0.96 | A |
| | | | | G = 0.066 | G = 0.069 | | | |
| 10150218 | 98229 | 71164379 | A/C | A = 0.724 | A = 0.723 | 0.993 | 1.00 | A |
| | | | | C = 0.276 | C = 0.277 | | | |
| 9646164 | 98235 | 71164385 | T/G | T = 0.797 | T = 0.772 | 0.351 | 0.86 | T |
| | | | | G = 0.203 | G = 0.228 | | | |
| 6574091 | 99173 | 71165323 | C/T | C = 0.995 | C = 0.999 | 0.652 | 3.38 | T |
| | | | | T = 0.005 | T = 0.001 | | | |
| 2332912 | 100505 | 71166655 | A/G | A = 0 | A = 0.001 | 0.941 | | G |
| | | | | G = 1.000 | G = 0.999 | | | |
| 7155359 | 101613 | 71167763 | A/G | A = 0.558 | A = 0.58 | 0.497 | 1.09 | G |
| | | | | G = 0.442 | G = 0.420 | | | |
| 2332913 | 101660 | 71167810 | C/T | C = 0.094 | C = 0.1 | 0.778 | 1.06 | T |
| | | | | T = 0.906 | T = 0.900 | | | |
| 4544184 | 101681 | 71167831 | G/T | G = 0.001 | G = 0.001 | 0.976 | 2.43 | T |
| | | | | T = 0.999 | T = 0.999 | | | |
| 4337224 | 102165 | 71168315 | G/A | G = 0.999 | G = 0.999 | 0.933 | 0.63 | G |
| | | | | A = 0.001 | A = 0.001 | | | |
| 2332914 | 103763 | 71169913 | C/T | C = 0.914 | C = 0.904 | 0.627 | 0.88 | C |
| | | | | T = 0.086 | T = 0.096 | | | |
| 4280167 | 104990 | 71171140 | G/A | G = 1.000 | G = 1.000 | 0.953 | 0.00 | G |
| | | | | A = 0 | A = 0.000 | | | |
| 4903049 | 105319 | 71171469 | G/T | G = 1.000 | G = 1.000 | 0.99 | 0.00 | G |
| | | | | T = 0 | T = 0.000 | | | |
| 3742837 | 105447 | 71171597 | T/G | T = 0.873 | T = 0.881 | 0.72 | 1.08 | G |
| | | | | G = 0.127 | G = 0.119 | | | |
| 10139937 | 105471 | 71171621 | A/G | A = 0.927 | A = 0.954 | 0.116 | 1.63 | G |
| | | | | G = 0.073 | G = 0.046 | | | |
| 12434292 | 105515 | 71171665 | A/G | A = 1.000 | A = 1.000 | 0.978 | 0.00 | A |
| | | | | G = 0 | G = 0.000 | | | |
| 11620671 | 105598 | 71171748 | A/T | A = 0.001 | A = 0.002 | 0.907 | 7.24 | T |
| | | | | T = 0.999 | T = 0.998 | | | |
| 10140184 | 105674 | 71171824 | C/A | C = 0.488 | C = 0.545 | 0.0731 | 1.26 | A |
| | | | | A = 0.512 | A = 0.455 | | | |
| 2332915 | 106432 | 71172582 | C/G | C = 0.45 | C = 0.461 | 0.749 | 1.04 | G |
| | | | | G = 0.550 | G = 0.539 | | | |
| 2332916 | 106988 | 71173138 | C/T | C = 0.245 | C = 0.19 | 0.0373 | 0.72 | C |
| | | | | T = 0.755 | T = 0.810 | | | |
| 8012759 | 107076 | 71173226 | C/T | C = 0.603 | C = 0.575 | 0.37 | 0.89 | C |
| | | | | T = 0.397 | T = 0.425 | | | |
| 10149272 | 107991 | 71174141 | G/C | G = 0.701 | G = 0.682 | 0.509 | 0.91 | G |
| | | | | C = 0.299 | C = 0.318 | | | |
| 11158973 | 108221 | 71174371 | A/G | A = 0.767 | A = 0.767 | 0.983 | 1.00 | G |
| | | | | G = 0.233 | G = 0.233 | | | |
| 4903050 | 108410 | 71174560 | G/T | G = 0.494 | G = 0.513 | 0.627 | 1.08 | T |
| | | | | T = 0.506 | T = 0.487 | | | |
| 10666445 | 108762 | 71174912 | CTTA/— | CTTA = | CTTA = 0.19 | | | |
| | | | | | — = 0.810 | | | |
| 2536143 | 108924 | 71175074 | A/T | A = 0.939 | A = 0.904 | 0.154 | 0.61 | A |
| | | | | T = 0.061 | T = 0.096 | | | |
| 10638231 | 109378 | 71175528 | TTTTTTT | TTTTTTTTT | TTTTTTTTT | 0.909 | 1.06 | — |
| | | | TTTTTT/— | TTTT = 0.923 | TTTT = 0.927 | | | |
| | | | | — = 0.077 | — = 0.073 | | | |
| 12431636 | 109442 | 71175592 | A/G | A = 0.219 | A = 0.218 | 0.964 | 0.99 | A |
| | | | | G = 0.781 | G = 0.782 | | | |
| 8005904 | 109619 | 71175769 | C/T | C = | C = 0.002 | | | |
| | | | | T = | T = 0.998 | | | |
| 11621058 | 109820 | 71175970 | C/T | C = 0.881 | C = 0.863 | 0.417 | 0.85 | C |
| | | | | T = 0.119 | T = 0.137 | | | |
| 10133224 | 110530 | 71176680 | T/C | T = 0 | T = 0 | 1 | | |
| | | | | C = 1.000 | C = 1.000 | | | |
| 12433185 | 110956 | 71177106 | A/T | A = 0.692 | A = 0.679 | 0.674 | 0.94 | A |
| | | | | T = 0.308 | T = 0.321 | | | |
| 740974 | 111965 | 71178115 | A/G | A = 0.764 | A = 0.754 | 0.717 | 0.95 | A |
| | | | | G = 0.236 | G = 0.246 | | | |
| 740973 | 111995 | 71178145 | G/C | G = 0.435 | G = 0.468 | 0.315 | 1.14 | C |
| | | | | C = 0.565 | C = 0.532 | | | |
| 740972 | 112040 | 71178190 | T/C | T = 0.637 | T = 0.649 | 0.71 | 1.05 | C |
| | | | | C = 0.363 | C = 0.351 | | | |
| 740971 | 112058 | 71178208 | A/G | A = 0.978 | A = 0.977 | 0.962 | 0.97 | A |
| | | | | G = 0.022 | G = 0.023 | | | |
| 4243642 | 112592 | 71178742 | C/G | C = 0.573 | C = 0.574 | 0.987 | 1.00 | G |
| | | | | G = 0.427 | G = 0.426 | | | |
| 4415952 | 113044 | 71179194 | C/T | C = 0.654 | C = 0.648 | 0.839 | 0.97 | C |
| | | | | T = 0.346 | T = 0.352 | | | |
| 2215589 | 113263 | 71179413 | G/A | G = 0.999 | G = 0.998 | 0.909 | 0.60 | G |
| | | | | A = 0.001 | A = 0.002 | | | |
| 4343211 | 113301 | 71179451 | T/C | T = 0 | T = 0.001 | 0.984 | | C |
| | | | | C = 1.000 | C = 0.999 | | | |
| 2536142 | 113513 | 71179663 | T/C | T = 0.87 | T = 0.86 | 0.682 | 0.92 | T |
| | | | | C = 0.130 | C = 0.140 | | | |
| 11293340 | 113639 | 71179789 | —/A | — = 0.002 | — = 0.002 | 0.995 | 0.97 | — |
| | | | | A = 0.998 | A = 0.998 | | | |
| 10151620 | 114092 | 71180242 | C/G | C = 0.625 | C = 0.615 | 0.757 | 0.96 | C |
| | | | | G = 0.375 | G = 0.385 | | | |
| 2286840 | 114432 | 71180582 | T/G | T = 0.999 | T = 0.998 | 0.943 | 0.66 | T |
| | | | | G = 0.001 | G = 0.002 | | | |
| 8023089 | 114643 | 71180793 | T/A | T = 0 | T = | | | |
| | | | | A = 1.000 | A = | | | |
| 8008009 | 114980 | 71181130 | G/A | G = 0.616 | G = 0.628 | 0.693 | 1.05 | A |
| | | | | A = 0.384 | A = 0.372 | | | |
| 11419089 | 115312 | 71181462 | —/T | — = 0.755 | — = 0.743 | 0.661 | 0.93 | — |
| | | | | T = 0.245 | T = 0.257 | | | |
| 10694676 | 115315 | 71181465 | —/TT | — = 0.938 | — = 0.927 | 0.581 | 0.84 | — |
| | | | | TT = 0.062 | TT = 0.073 | | | |
| 2536141 | 115377 | 71181527 | C/T | C = 0.884 | C = 0.878 | 0.78 | 0.94 | C |
| | | | | T = 0.116 | T = 0.122 | | | |
| 765247 | 115625 | 71181775 | C/A | C = 0.978 | C = 0.981 | 0.917 | 1.13 | A |
| | | | | A = 0.022 | A = 0.019 | | | |
| 7147626 | 115740 | 71181890 | T/C | T = 0.973 | T = 0.95 | 0.147 | 0.53 | T |
| | | | | C = 0.027 | C = 0.050 | | | |
| 10132629 | 115747 | 71181897 | G/A | G = 0.649 | G = 0.656 | 0.799 | 1.03 | A |
| | | | | A = 0.351 | A = 0.344 | | | |
| 4903051 | 115890 | 71182040 | C/G | C = 0.976 | C = 0.965 | 0.541 | 0.68 | C |
| | | | | G = 0.024 | G = 0.035 | | | |
| 11158974 | 117279 | 71183429 | T/C | T = 0.976 | T = 0.961 | 0.241 | 0.60 | T |
| | | | | C = 0.024 | C = 0.039 | | | |
| 1035021 | 117522 | 71183672 | C/A | C = 0.513 | C = 0.509 | 0.909 | 0.99 | C |
| | | | | A = 0.487 | A = 0.491 | | | |
| 6574093 | 118721 | 71184871 | T/G | T = 0.433 | T = 0.445 | 0.721 | 1.05 | G |
| | | | | G = 0.567 | G = 0.555 | | | |
| 4899439 | 119926 | 71186076 | T/C | T = 0.973 | T = 0.958 | 0.35 | 0.65 | T |
| | | | | C = 0.027 | C = 0.042 | | | |
| 7155287 | 119974 | 71186124 | T/A | T = 1.000 | T = 0.999 | 0.835 | 0.17 | T |
| | | | | A = 0.000 | A = 0.001 | | | |
| 7154402 | 120281 | 71186431 | A/G | A = 0.972 | A = 0.948 | 0.158 | 0.53 | A |
| | | | | G = 0.028 | G = 0.052 | | | |
| 7154781 | 120484 | 71186634 | G/A | G = 0.971 | G = 0.956 | 0.315 | 0.65 | G |
| | | | | A = 0.029 | A = 0.044 | | | |
| 6574094 | 122397 | 71188547 | C/T | C = 0.972 | C = 0.948 | 0.0851 | 0.52 | C |
| | | | | T = 0.028 | T = 0.052 | | | |
| 10132242 | 122783 | 71188933 | G/A | G = 0.975 | G = 0.946 | 0.0436 | 0.46 | G |
| | | | | A = 0.025 | A = 0.054 | | | |
| 10146959 | 123029 | 71189179 | T/C | T = 0.694 | T = 0.698 | 0.875 | 1.02 | C |
| | | | | C = 0.306 | C = 0.302 | | | |
| 10147466 | 123535 | 71189685 | T/C | T = 1.000 | T = 1.000 | 0.95 | 0.00 | T |
| | | | | C = 0 | C = 0.000 | | | |
| 11626411 | 124107 | 71190257 | G/C | G = 0.757 | G = 0.774 | 0.539 | 1.10 | C |
| | | | | C = 0.243 | C = 0.226 | | | |
| 4899440 | 124427 | 71190577 | C/T | C = 0.683 | C = 0.727 | 0.129 | 1.24 | T |
| | | | | T = 0.317 | T = 0.273 | | | |
| 10144553 | 124738 | 71190888 | T/C | T = 0.539 | T = 0.526 | 0.677 | 0.95 | T |
| | | | | C = 0.461 | C = 0.474 | | | |
| 11627663 | 125329 | 71191479 | A/C | A = 0.009 | A = 0.078 | 0.00136 | 9.35 | C |
| | | | | C = 0.991 | C = 0.922 | | | |
| 11627799 | 125796 | 71191946 | A/G | A = 0.669 | A = 0.668 | 0.959 | 0.99 | A |
| | | | | G = 0.331 | G = 0.332 | | | |
| 11851733 | 126265 | 71192415 | G/A | G = 0.65 | G = 0.665 | 0.631 | 1.07 | A |
| | | | | A = 0.350 | A = 0.335 | | | |
| 10140317 | 126768 | 71192918 | A/T | A = 0.476 | A = 0.455 | 0.514 | 0.92 | A |
| | | | | T = 0.524 | T = 0.545 | | | |
| 8007375 | 127306 | 71193456 | C/T | C = 0.001 | C = 0.001 | 0.937 | 3.61 | T |
| | | | | T = 0.999 | T = 0.999 | | | |
| 4899441 | 127544 | 71193694 | G/A | G = 0.043 | G = 0.094 | 0.00298 | 2.32 | A |
| | | | | A = 0.957 | A = 0.906 | | | |
| 11158975 | 127809 | 71193959 | A/C | A = 0.798 | A = 0.814 | 0.564 | 1.11 | C |
| | | | | C = 0.202 | C = 0.186 | | | |
| 11419607 | 127817 | 71193967 | A/— | A = 0.829 | A = 0.808 | 0.406 | 0.86 | A |
| | | | | — = 0.171 | — = 0.192 | | | |
| 2109793 | 129771 | 71195921 | C/G | C = | C = 0.997 | | | |
| | | | | G = | G = 0.003 | | | |
| 8023156 | 130061 | 71196211 | G/C | G = 0.706 | G = 0.706 | 0.987 | 1.00 | C |
| | | | | C = 0.294 | C = 0.294 | | | |
| 10140579 | 130333 | 71196483 | G/A | G = 0.002 | G = 0.001 | 0.984 | 0.86 | G |
| | | | | A = 0.998 | A = 0.999 | | | |
| 7148199 | 131734 | 71197884 | T/C | T = 0.078 | T = 0.119 | 0.0481 | 1.61 | C |
| | | | | C = 0.922 | C = 0.881 | | | |
| 7146916 | 131787 | 71197937 | G/A | G = 0.001 | G = 0.002 | 0.823 | 54.34 | A |
| | | | | A = 0.999 | A = 0.998 | | | |
| 1990439 | 132633 | 71198783 | G/A | G = 0.67 | G = 0.72 | 0.103 | 1.27 | A |
| | | | | A = 0.330 | A = 0.280 | | | |
| 6574095 | 135279 | 71201429 | C/G | C = 0.057 | C = 0.093 | 0.0585 | 1.71 | G |
| | | | | G = 0.943 | G = 0.907 | | | |
| 10140037 | 135709 | 71201859 | T/A | T = 0.456 | T = 0.438 | 0.569 | 0.93 | T |
| | | | | A = 0.544 | A = 0.562 | | | |
| 8007249 | 136208 | 71202358 | A/G | A = 0.81 | A = 0.791 | 0.512 | 0.89 | A |
| | | | | G = 0.190 | G = 0.209 | | | |
| 1990438 | 137091 | 71203241 | A/G | A = 0.902 | A = 0.859 | 0.07 | 0.66 | A |
| | | | | G = 0.098 | G = 0.141 | | | |
| 1990437 | 137499 | 71203649 | T/C | T = 0.092 | T = 0.155 | 0.00367 | 1.82 | C |
| | | | | C = 0.908 | C = 0.845 | | | |
| 10146484 | 137705 | 71203855 | A/G | A = 0.69 | A = 0.679 | 0.719 | 0.95 | A |
| | | | | G = 0.310 | G = 0.321 | | | |
| 11627333 | 137726 | 71203876 | A/C | A = 0.336 | A = 0.325 | 0.716 | 0.95 | A |
| | | | | C = 0.664 | C = 0.675 | | | |
| 7155802 | 137944 | 71204094 | G/A | G = 0.012 | G = 0.007 | 0.746 | 0.55 | G |
| | | | | A = 0.988 | A = 0.993 | | | |
| 2109792 | 138175 | 71204325 | T/G | T = 0 | T = 0 | 1 | | |
| | | | | G = 1.000 | G = 1.000 | | | |
| 11429363 | 138224 | 71204374 | A— | A = 0.24 | A = 0.262 | 0.455 | 1.13 | — |
| | | | | — = 0.760 | — = 0.738 | | | |
| 8004210 | 139319 | 71205469 | A/G | A = 0.94 | A = 0.887 | 0.00878 | 0.50 | A |
| | | | | G = 0.060 | G = 0.113 | | | |
| 2098194 | 139409 | 71205559 | C/T | C = 1.000 | C = 0.999 | 0.922 | 0.54 | C |
| | | | | T = 0.000 | T = 0.001 | | | |
| 2109791 | 139597 | 71205747 | T/G | T = 0.753 | T = 0.724 | 0.315 | 0.86 | T |
| | | | | G = 0.247 | G = 0.276 | | | |
| 11381729 | 140476 | 71206626 | —/A | — = 0.45 | — = 0.492 | 0.18 | 1.18 | A |
| | | | | A = 0.550 | A = 0.508 | | | |
| 1160094 | 140808 | 71206958 | C/T | C = 0.731 | C = 0.751 | 0.514 | 1.11 | T |
| | | | | T = 0.269 | T = 0.249 | | | |
| 11628051 | 141363 | 71207513 | A/T | A = 0.386 | A = 0.328 | 0.0555 | 0.77 | A |
| | | | | T = 0.614 | T = 0.672 | | | |
| 10136771 | 141655 | 71207805 | G/A | G = 0.341 | G = 0.38 | 0.235 | 1.18 | A |
| | | | | A = 0.659 | A = 0.620 | | | |
| 10139903 | 142715 | 71208865 | A/C | A = 0.592 | A = 0.547 | 0.145 | 0.83 | A |
| | | | | C = 0.408 | C = 0.453 | | | |
| 4903053 | 143253 | 71209403 | C/T | C = 0.74 | C = 0.768 | 0.327 | 1.16 | T |
| | | | | T = 0.260 | T = 0.232 | | | |
| 3742836 | 143911 | 71210061 | T/C | T = 0.752 | T = 0.776 | 0.39 | 1.14 | C |
| | | | | C = 0.248 | C = 0.224 | | | |
| 3742835 | 144044 | 71210194 | G/A | G = 0.311 | G = 0.311 | 0.999 | 1.00 | G |
| | | | | A = 0.689 | A = 0.689 | | | |
| 8003233 | 144670 | 71210820 | T/G | T = 0.002 | T = 0.002 | 0.971 | 0.78 | T |
| | | | | G = 0.998 | G = 0.998 | | | |
| 11621588 | 144961 | 71211111 | C/T | C = 0.999 | C = 1.000 | 0.913 | 2.87 | T |
| | | | | T = 0.001 | T = 0.000 | | | |
| 740981 | 146613 | 71212763 | G/C | G = 0.468 | G = 0.425 | 0.187 | 0.84 | G |
| | | | | C = 0.532 | C = 0.575 | | | |
| 8019492 | 147413 | 71213563 | C/A | C = 0.001 | C = 0.002 | 0.882 | 2.59 | A |
| | | | | A = 0.999 | A = 0.998 | | | |
| 8019644 | 147464 | 71213614 | G/A | G = 0.001 | G = 0.002 | 0.899 | 2.47 | A |
| | | | | A = 0.999 | A = 0.998 | | | |
| 8019646 | 147468 | 71213618 | G/A | G = 0.541 | G = 0.569 | 0.422 | 1.12 | A |
| | | | | A = 0.459 | A = 0.431 | | | |
| 8019653 | 147479 | 71213629 | A/G | A = 0.581 | A = 0.65 | 0.0322 | 1.34 | G |
| | | | | G = 0.419 | G = 0.350 | | | |
| 11450794 | 147488 | 71213638 | A/— | A = 0.002 | A = 0.001 | 0.946 | 0.50 | A |
| | | | | — = 0.998 | — = 0.999 | | | |
| 11348193 | 147500 | 71213650 | —/A | — = 0.67 | — = 0.636 | 0.277 | 0.86 | — |
| | | | | A = 0.330 | A = 0.364 | | | |
| 11450793 | 147527 | 71213677 | G/— | G = 0.007 | G = 0.005 | 0.894 | 0.77 | G |
| | | | | — = 0.993 | — = 0.995 | | | |
| 11282735 | 147534 | 71213684 | AAGAG | AAGAG | AAGAG | 0.911 | 0.59 | AAGAG |
| | | | AAGAG/— | AAGAG = 0.004 | AAGAG = 0.003 | | | AAGAG |
| | | | | — = 0.996 | — = 0.997 | | | |
| 2191823 | 149573 | 71215723 | G/T | G = 0.504 | G = 0.467 | 0.242 | 0.86 | G |
| | | | | T = 0.496 | T = 0.533 | | | |
| 12232220 | 150798 | 71216948 | A/G | A = 0.143 | A = 0.235 | 0.000383 | 1.85 | G |
| | | | | G = 0.857 | G = 0.765 | | | |
| 11158976 | 154169 | 71220319 | C/T | C = 0.747 | C = 0.791 | 0.111 | 1.28 | T |
| | | | | T = 0.253 | T = 0.209 | | | |
| 4903054 | 155056 | 71221206 | C/T | C = 1.000 | C = 0.999 | 0.94 | 0.53 | C |
| | | | | T = 0.000 | T = 0.001 | | | |
| 11846755 | 155494 | 71221644 | T/C | T = 0.703 | T = 0.704 | 0.988 | 1.00 | C |
| | | | | C = 0.297 | C = 0.296 | | | |
| 12431988 | 157756 | 71223906 | G/A | G = 0.547 | G = 0.557 | 0.754 | 1.04 | A |
| | | | | A = 0.453 | A = 0.443 | | | |
| 12100526 | 157830 | 71223980 | T/C | T = 0.001 | T = 0.002 | 0.97 | 1.30 | C |
| | | | | C = 0.999 | C = 0.998 | | | |
| 11622568 | 158379 | 71224529 | A/C | A = 0.476 | A = 0.442 | 0.279 | 0.87 | A |
| | | | | C = 0.524 | C = 0.558 | | | |
| 9671230 | 159906 | 71226056 | C/T | C = 0.001 | C = 0.001 | 0.96 | 1.81 | T |
| | | | | T = 0.999 | T = 0.999 | | | |
| 12147487 | 159951 | 71226101 | A/T | A = 0.596 | A = 0.616 | 0.527 | 1.09 | T |
| | | | | T = 0.404 | T = 0.384 | | | |
| 4903055 | 160135 | 71226285 | T/C | T = 0.879 | T = 0.876 | 0.885 | 0.97 | T |
| | | | | C = 0.121 | C = 0.124 | | | |
| 12147515 | 160209 | 71226359 | G/A | G = 0.955 | G = 0.954 | 0.958 | 0.98 | G |
| | | | | A = 0.045 | A = 0.046 | | | |
| 11625092 | 160351 | 71226501 | C/T | C = 0.999 | C = 0.999 | 0.972 | 0.84 | C |
| | | | | T = 0.001 | T = 0.001 | | | |
| 4899442 | 160835 | 71226985 | T/G | T = 0.042 | T = 0.088 | 0.0124 | 2.21 | G |
| | | | | G = 0.958 | G = 0.912 | | | |
| 2052146 | 161110 | 71227260 | A/C | A = 0.977 | A = 0.957 | 0.145 | 0.53 | A |
| | | | | C = 0.023 | C = 0.043 | | | |
| 10220553 | 161346 | 71227496 | A/T | A = 0.438 | A = 0.45 | 0.714 | 1.05 | T |
| | | | | T = 0.562 | T = 0.550 | | | |
| 10220565 | 161670 | 71227820 | A/G | A = | A = 0.159 | | | |
| | | | | G = | G = 0.841 | | | |
| 2332917 | 163447 | 71229597 | G/C | G = 0.045 | G = 0.013 | 0.0175 | 0.27 | G |
| | | | | C = 0.955 | C = 0.987 | | | |
| 7158910 | 163479 | 71229629 | G/A | G = 1.000 | G = 1.000 | 0.988 | 0.00 | G |
| | | | | A = 0 | A = 0.000 | | | |
| 8015749 | 164377 | 71230527 | A/G | A = 0.203 | A = 0.303 | 0.00603 | 1.70 | G |
| | | | | G = 0.797 | G = 0.697 | | | |
| 8006812 | 166328 | 71232478 | A/G | A = 0.999 | A = 0.999 | 0.969 | 1.34 | G |
| | | | | G = 0.001 | G = 0.001 | | | |
| 8008338 | 166361 | 71232511 | C/T | C = 0.002 | C = 0.003 | 0.911 | 1.49 | T |
| | | | | T = 0.998 | T = 0.997 | | | |
| 2052145 | 167003 | 71233153 | T/G | T = 0.142 | T = 0.199 | 0.117 | 1.50 | G |
| | | | | G = 0.858 | G = 0.801 | | | |
| 2052144 | 167036 | 71233186 | T/G | T = 0.243 | T = 0.223 | 0.595 | 0.89 | T |
| | | | | G = 0.757 | G = 0.777 | | | |
| 10146692 | 167759 | 71233909 | A/G | A = 0.492 | A = 0.472 | 0.553 | 0.93 | A |
| | | | | G = 0.508 | G = 0.528 | | | |
| 11627305 | 167829 | 71233979 | A/G | A = 0.831 | A = 0.836 | 0.828 | 1.04 | G |
| | | | | G = 0.169 | G = 0.164 | | | |
| 2079989 | 168360 | 71234510 | C/T | C = 0.466 | C = 0.444 | 0.491 | 0.92 | C |
| | | | | T = 0.534 | T = 0.556 | | | |
| 8018881 | 168582 | 71234732 | C/A | C = 0.998 | C = 0.994 | 0.738 | 0.33 | C |
| | | | | A = 0.002 | A = 0.006 | | | |
| 4561387 | 169462 | 71235612 | A/T | A = 0.894 | A = 0.892 | 0.921 | 0.98 | A |
| | | | | T = 0.106 | T = 0.108 | | | |
| 11622025 | 170317 | 71236467 | A/C | A = 0.26 | A = 0.241 | 0.498 | 0.90 | A |
| | | | | C = 0.740 | C = 0.759 | | | |
| 740980 | 170669 | 71236819 | A/G | A = 0.378 | A = 0.354 | 0.498 | 0.90 | A |
| | | | | G = 0.622 | G = 0.646 | | | |
| 12433250 | 171295 | 71237445 | T/C | T = 0.285 | T = 0.258 | 0.36 | 0.87 | T |
| | | | | C = 0.715 | C = 0.742 | | | |
| 5809590 | 171395 | 71237545 | —/A | — = 0.249 | — = 0.266 | 0.554 | 1.09 | A |
| | | | | A = 0.751 | A = 0.734 | | | |
| 758915 | 171431 | 71237581 | T/C | T = 0.28 | T = 0.281 | 0.988 | 1.00 | C |
| | | | | C = 0.720 | C = 0.719 | | | |
| 758914 | 171626 | 71237776 | A/T | A = 0.249 | A = 0.249 | 0.998 | 1.00 | T |
| | | | | T = 0.751 | T = 0.751 | | | |
| 7154229 | 171735 | 71237885 | G/A | G = 1.000 | G = 0.999 | 0.901 | 0.17 | G |
| | | | | A = 0.000 | A = 0.001 | | | |
| 12437188 | 171972 | 71238122 | T/C | T = 0.894 | T = 0.948 | 0.00279 | 2.15 | C |
| | | | | C = 0.106 | C = 0.052 | | | |
| 7159108 | 172258 | 71238408 | T/A | T = 0.739 | T = 0.746 | 0.802 | 1.04 | A |
| | | | | A = 0.261 | A = 0.254 | | | |
| 4903058 | 172448 | 71238598 | G/C | G = 1.000 | G = 1.000 | 0.993 | | C |
| | | | | C = 0.000 | C = 0 | | | |
| 4899443 | 172918 | 71239068 | C/A | C = 0.775 | C = 0.806 | 0.264 | 1.21 | A |
| | | | | A = 0.225 | A = 0.194 | | | |
| 11848907 | 173415 | 71239565 | A/G | A = 0.037 | A = 0.032 | 0.704 | 0.85 | A |
| | | | | G = 0.963 | G = 0.968 | | | |
| 12432148 | 173467 | 71239617 | G/T | G = 0.201 | G = 0.11 | 0.000319 | 0.49 | G |
| | | | | T = 0.799 | T = 0.890 | | | |
| 12435078 | 173697 | 71239847 | C/t | C = 0.912 | C = 0.905 | 0.823 | 0.92 | C |
| | | | | T = 0.088 | T = 0.095 | | | |
| 6574096 | 173991 | 71240141 | A/G | A = 0.461 | A = 0.411 | 0.122 | 0.82 | A |
| | | | | G = 0.539 | G = 0.589 | | | |
| 11158977 | 174091 | 71240241 | T/A | T = 0.4 | T = 0.435 | 0.259 | 1.16 | A |
| | | | | A = 0.600 | A = 0.565 | | | |
| 11629434 | 174571 | 71240721 | G/T | G = 0.841 | G = 0.842 | 0.974 | 1.01 | T |
| | | | | T = 0.159 | T = 0.158 | | | |
| 4378563 | 177780 | 71243930 | C/T | C = 0.863 | C = 0.932 | 0.00102 | 2.16 | T |
| | | | | T = 0.137 | T = 0.068 | | | |
| 2098195 | 178129 | 71244279 | C/G | C = 0.032 | C = 0.03 | 0.906 | 0.95 | C |
| | | | | G = 0.968 | G = 0.970 | | | |
| 4633653 | 178693 | 71244843 | C/A | C = 0.998 | C = 0.998 | 0.931 | 1.34 | A |
| | | | | A = 0.002 | A = 0.002 | | | |
| 7148350 | 179325 | 71245475 | G/A | G = 0.962 | G = 0.953 | 0.535 | 0.80 | G |
| | | | | A = 0.038 | A = 0.047 | | | |
| 740979 | 179511 | 71245661 | A/T | A = 0.34 | A = 0.31 | 0.36 | 0.87 | A |
| | | | | T = 0.660 | T = 0.690 | | | |
| 740978 | 179608 | 71245758 | G/C | G = 0.983 | G = 0.953 | 0.02 | 0.35 | G |
| | | | | C = 0.017 | C = 0.047 | | | |
| 740977 | 179644 | 71245794 | A/G | A = 0.086 | A = 0.129 | 0.0512 | 1.57 | G |
| | | | | G = 0.914 | G = 0.871 | | | |
| 740976 | 179808 | 71245958 | T/C | T = 0.39 | T = 0.323 | 0.0353 | 0.74 | T |
| | | | | C = 0.610 | C = 0.677 | | | |
| 4903059 | 180041 | 71246191 | C/T | C = 0.138 | C = 0.083 | 0.00674 | 0.56 | C |
| | | | | T = 0.862 | T = 0.917 | | | |
| 4903060 | 181420 | 71247570 | G/A | G = 0.995 | G = 0.96 | 0.00327 | 0.13 | G |
| | | | | A = 0.005 | A = 0.040 | | | |
| 11852056 | 181423 | 71247573 | A/G | A = 0.001 | A = 0.001 | 0.999 | 1.03 | G |
| | | | | G = 0.999 | G = 0.999 | | | |
| 9635257 | 181932 | 71248082 | C/T | C = 0.947 | C = 0.954 | 0.722 | 1.17 | T |
| | | | | T = 0.053 | T = 0.046 | | | |
| 9635258 | 181992 | 71248142 | C/T | C = 0.93 | C = 0.935 | 0.83 | 1.09 | T |
| | | | | T = 0.070 | T = 0.065 | | | |
| 9635259 | 182248 | 71248398 | A/G | A = 0.896 | A = 0.942 | 0.0142 | 1.88 | G |
| | | | | G = 0.104 | G = 0.058 | | | |
| 4899444 | 182335 | 71248485 | G/A | G = 0.868 | G = 0.887 | 0.418 | 1.19 | A |
| | | | | A = 0.132 | A = 0.113 | | | |
| 12435382 | 184268 | 71250418 | G/A | G = 0.777 | G = 0.79 | 0.614 | 1.08 | A |
| | | | | A = 0.223 | A = 0.210 | | | |
| 12435412 | 184366 | 71250516 | G/A | G = 0.831 | G = 0.828 | 0.883 | 0.98 | G |
| | | | | A = 0.169 | A = 0.172 | | | |
| 11627381 | 184855 | 71251005 | G/A | G = 0.178 | G = 0.177 | 0.955 | 0.99 | G |
| | | | | A = 0.822 | A = 0.823 | | | |
| 2052143 | 185532 | 71251682 | G/A | G = 0.537 | G = 0.593 | 0.072 | 1.26 | A |
| | | | | A = 0.463 | A = 0.407 | | | |
| 2052142 | 185633 | 71251783 | G/A | G = 0.98 | G = 0.95 | 0.0255 | 0.39 | G |
| | | | | A = 0.020 | A = 0.050 | | | |
| 2052141 | 185717 | 71251867 | C/T | C = 0.641 | C = 0.686 | 0.134 | 1.22 | T |
| | | | | T = 0.359 | T = 0.314 | | | |
| 8021035 | 186637 | 71252787 | A/G | A = 0.001 | A = 0.002 | 0.955 | 1.61 | G |
| | | | | G = 0.999 | G = 0.998 | | | |
| 11158978 | 187010 | 71253160 | A/G | A = 0.402 | A = 0.387 | 0.666 | 0.94 | A |
| | | | | G = 0.598 | G = 0.613 | | | |
| 11621216 | 187367 | 71253517 | A/T | A = 0.882 | A = 0.882 | 0.979 | 0.99 | A |
| | | | | T = 0.118 | T = 0.118 | | | |
| 10130873 | 187524 | 71253674 | T/C | T = 0.901 | T = 0.936 | 0.0616 | 1.60 | C |
| | | | | C = 0.099 | C = 0.064 | | | |
| 11621358 | 187525 | 71253675 | G/A | G = 0.864 | G = 0.867 | 0.863 | 1.03 | A |
| | | | | A = 0.136 | A = 0.133 | | | |
| 758913 | 188352 | 71254502 | A/G | A = 0.071 | A = 0.133 | 0.00789 | 2.00 | G |
| | | | | G = 0.929 | G = 0.867 | | | |
| 11622602 | 188360 | 71254510 | A/G | A = 0.241 | A = 0.218 | 0.402 | 0.88 | A |
| | | | | G = 0.759 | G = 0.782 | | | |
| 10136931 | 189032 | 71255182 | C/T | C = 1.000 | C = 1.000 | 0.969 | 0.00 | C |
| | | | | T = 0 | T = 0.000 | | | |
| 740975 | 189100 | 71255250 | T/G | T = 0.543 | T = 0.489 | 0.116 | 0.80 | T |
| | | | | G = 0.457 | G = 0.511 | | | |
| 747987 | 189444 | 71255594 | T/C | T = 0.291 | T = 0.186 | 0.000134 | 0.56 | T |
| | | | | C = 0.709 | C = 0.814 | | | |
| 11623819 | 189450 | 71255600 | C/T | C = 0.736 | C = 0.703 | 0.285 | 0.85 | C |
| | | | | T = 0.264 | T = 0.297 | | | |
| 12434445 | 190431 | 71256581 | C/A | C = 0.003 | C = 0.001 | 0.88 | 0.44 | C |
| | | | | A = 0.997 | A = 0.999 | | | |
| 8003375 | 190813 | 71256963 | T/A | T = 0.001 | T = 0.001 | 0.995 | 1.58 | A |
| | | | | A = 0.999 | A = 0.999 | | | |
| 10143596 | 190983 | 71257133 | A/G | A = 0.997 | A = 0.996 | 0.925 | 0.75 | A |
| | | | | G = 0.003 | G = 0.004 | | | |
| 12435321 | 191493 | 71257643 | T/C | T = 0.164 | T = 0.163 | 0.968 | 0.99 | T |
| | | | | C = 0.836 | C = 0.837 | | | |
| 12435401 | 191588 | 71257738 | A/G | A = | A = 0.302 | | | |
| | | | | G = | G = 0.698 | | | |
| 8010609 | 191764 | 71257914 | T/C | T = 1.000 | T = 0.999 | 0.915 | 0.43 | T |
| | | | | C = 0.000 | C = 0.001 | | | |
| 11158979 | 191811 | 71257961 | G/C | G = 0.291 | G = 0.284 | 0.822 | 0.97 | G |
| | | | | C = 0.709 | C = 0.716 | | | |
| 11158980 | 192126 | 71258276 | C/T | C = 0.271 | C = 0.243 | 0.324 | 0.87 | C |
| | | | | T = 0.729 | T = 0.757 | | | |
| 11627524 | 192356 | 71258506 | C/A | C = 0.897 | C = 0.892 | 0.828 | 0.95 | C |
| | | | | A = 0.103 | A = 0.108 | | | |
| 1126160 | 192953 | 71259103 | A/C | A = 0.657 | A = 0.587 | 0.0717 | 0.74 | A |
| | | | | C = 0.343 | C = 0.413 | | | |
| 10136074 | 194133 | 71260283 | G/C | G = 0.998 | G = 0.993 | 0.564 | 0.28 | G |
| | | | | C = 0.002 | C = 0.007 | | | |
| 4903061 | 195333 | 71261483 | T/A | T = 0.372 | T = | | | |
| | | | | A = 0.628 | A = | | | |
| 10665398 | 195657 | 71261807 | —/CA | — = 0.538 | — = 0.544 | 0.842 | 1.03 | CA |
| | | | | CA = 0.462 | CA = 0.456 | | | |
| 6574097 | 195668 | 71261818 | A/C | A = 0.976 | A = 0.949 | 0.176 | 0.46 | A |
| | | | | C = 0.024 | C = 0.051 | | | |
| 9671654 | 195676 | 71261826 | C/G | C = 0.253 | C = 0.235 | 0.538 | 0.91 | C |
| | | | | G = 0.747 | G = 0.765 | | | |
| 10140024 | 195805 | 71261955 | C/T | C = 0.354 | C = 0.314 | 0.203 | 0.84 | C |
| | | | | T = 0.646 | T = 0.686 | | | |
| 10142421 | 195998 | 71262148 | G/A | G = 0.97 | G = 0.973 | 0.832 | 1.10 | A |
| | | | | A = 0.030 | A = 0.027 | | | |
| 10142593 | 196066 | 71262216 | C/T | C = 0.023 | C = 0.057 | 0.0509 | 2.57 | T |
| | | | | T = 0.977 | T = 0.943 | | | |
| 11423372 | 196415 | 71262565 | —/C | — = 0.072 | — = 0.113 | 0.0327 | 1.65 | C |
| | | | | C = 0.928 | C = 0.887 | | | |
| 5809592 | 196417 | 71262567 | —/C | — = 0.0680 | — = 0.109 | 0.0442 | 1.68 | C |
| | | | | C = 0.932 | C = 0.891 | | | |
| 2332918 | 196538 | 71262688 | C/T | C = 0.953 | C = 0.93 | 0.169 | 0.65 | C |
| | | | | T = 0.047 | T = 0.070 | | | |
| 2332919 | 196569 | 71262719 | T/C | T = 0.704 | T = 0.728 | 0.388 | 1.13 | C |
| | | | | C = 0.296 | C = 0.272 | | | |
| 8007348 | 196621 | 71262771 | A/C | A = 0.417 | A = 0.34 | 0.0161 | 0.72 | A |
| | | | | C = 0.583 | C = 0.660 | | | |
| 1990443 | 196806 | 71262956 | G/A | G = 0.678 | G = 0.729 | 0.0751 | 1.28 | A |
| | | | | A = 0.322 | A = 0.271 | | | |
| 8007690 | 196823 | 71262973 | C/G | C = 0.175 | C = 0.169 | 0.829 | 0.96 | C |
| | | | | G = 0.825 | G = 0.831 | | | |
| 3937455 | 197204 | 71263354 | G/C | G = 0.556 | G = 0.546 | 0.768 | 0.96 | G |
| | | | | C = 0.444 | C = 0.454 | | | |
| 8012823 | 197435 | 71263585 | C/T | C = 0.65 | C = 0.651 | 0.97 | 1.00 | T |
| | | | | T = 0.350 | T = 0.349 | | | |
| 4899445 | 197612 | 71263762 | G/A | G = 0.129 | G = 0.0630 | 0.000836 | 0.45 | G |
| | | | | A = 0.871 | A = 0.937 | | | |
| 4903062 | 197854 | 71264004 | C/T | C = 0.229 | C = 0.118 | 5.96E−06 | 0.45 | C |
| | | | | T = 0.771 | T = 0.882 | | | |
| 973963 | 198264 | 71264414 | G/A | G = 0.968 | G = 0.964 | 0.736 | 0.87 | G |
| | | | | A = 0.032 | A = 0.036 | | | |
| 10149962 | 198835 | 71264985 | T/G | T = 0.963 | T = 0.949 | 0.321 | 0.71 | T |
| | | | | G = 0.037 | G = 0.051 | | | |
| 8003449 | 199275 | 71265425 | A/G | A = 0.39 | A = 0.368 | 0.576 | 0.91 | A |
| | | | | G = 0.610 | G = 0.632 | | | |
| 11620775 | 199336 | 71265486 | C/T | C = 0.827 | C = 0.809 | 0.476 | 0.88 | C |
| | | | | T = 0.173 | T = 0.191 | | | |
| 8009089 | 199903 | 71266053 | A/G | A = 0.848 | A = 0.876 | 0.217 | 1.27 | G |
| | | | | G = 0.152 | G = 0.124 | | | |
| 8008967 | 200017 | 71266167 | T/C | T = 0.358 | T = 0.406 | 0.136 | 1.23 | C |
| | | | | C = 0.642 | C = 0.594 | | | |
| 12050132 | 200141 | 71266291 | A/T | A = 0.782 | A = 0.761 | 0.509 | 0.89 | A |
| | | | | T = 0.218 | T = 0.239 | | | |
| 10133018 | 200552 | 71266702 | T/C | T = 0.999 | T = 0.993 | 0.511 | 0.20 | T |
| | | | | C = 0.001 | C = 0.007 | | | |
| 1990442 | 200868 | 71267018 | T/C | T = | T = 0.926 | | | |
| | | | | C = | C = 0.074 | | | |
| 1990441 | 200983 | 71267133 | T/G | T = 0.873 | T = 0.848 | 0.338 | 0.81 | T |
| | | | | G = 0.127 | G = 0.152 | | | |
| 8015833 | 200990 | 71267140 | C/T | C = 0.768 | C = 0.79 | 0.423 | 1.14 | T |
| | | | | T = 0.232 | T = 0.210 | | | |
| 1990440 | 201045 | 71267195 | G/C | G = 0.258 | G = 0.161 | 0.000297 | 0.55 | G |
| | | | | C = 0.742 | C = 0.839 | | | |
| 4903063 | 202426 | 71268576 | C/G | C = 0.989 | C = 0.969 | 0.188 | 0.35 | C |
| | | | | G = 0.011 | G = 0.031 | | | |
| 10139810 | 202841 | 71268991 | C/A | C = 0.002 | C = 0.006 | 0.74 | 3.78 | A |
| | | | | A = 0.998 | A = 0.994 | | | |
| 4903064 | 203311 | 71269461 | T/C | T = 0.83 | T = 0.823 | 0.783 | 0.95 | T |
| | | | | C = 0.170 | C = 0.177 | | | |
| 2159715 | 203543 | 71269693 | A/C | A = 0.468 | A = 0.458 | 0.748 | 0.96 | A |
| | | | | C = 0.532 | C = 0.542 | | | |
| 2109795 | 203749 | 71269899 | A/G | A = 0.206 | A = 0.255 | 0.106 | 1.32 | G |
| | | | | G = 0.794 | G = 0.745 | | | |
| 2159714 | 204040 | 71270190 | G/A | G = 0.965 | G = 0.96 | 0.714 | 0.87 | G |
| | | | | A = 0.035 | A = 0.040 | | | |
| 11623107 | 204269 | 71270419 | A/C | A = 0.001 | A = 0.002 | 0.883 | 5.49 | C |
| | | | | C = 0.999 | C = 0.998 | | | |
| 7152005 | 204309 | 71270459 | C/T | C = 0.806 | C = 0.776 | 0.295 | 0.84 | C |
| | | | | T = 0.194 | T = 0.224 | | | |
| 7152489 | 204426 | 71270576 | A/G | A = 0.004 | A = 0.002 | 0.919 | 0.65 | A |
| | | | | G = 0.996 | G = 0.998 | | | |
| 4479167 | 205135 | 71271285 | G/C | G = 0.169 | G = 0.278 | 0.000123 | 1.90 | C |
| | | | | C = 0.831 | C = 0.722 | | | |
| 4606655 | 205269 | 71271419 | T/C | T = 0.794 | T = 0.734 | 0.041 | 0.72 | T |
| | | | | C = 0.206 | C = 0.266 | | | |
| 4606656 | 205323 | 71271473 | T/C | T = 0.938 | T = 0.872 | 0.0032 | 0.45 | T |
| | | | | C = 0.062 | C = 0.128 | | | |
| 4489943 | 205364 | 71271514 | A/G | A = 0.546 | A = 0.427 | 0.00025 | 0.62 | A |
| | | | | G = 0.454 | G = 0.573 | | | |
| 7142642 | 206310 | 71272460 | G/C | G = 0.616 | G = 0.601 | 0.643 | 0.94 | G |
| | | | | C = 0.384 | C = 0.399 | | | |
| 8006233 | 206600 | 71272750 | A/G | A = 0.814 | A = | | | |
| | | | | G = 0.186 | G = | | | |
| 8007559 | 206786 | 71272936 | T/A | T = 0.426 | T = 0.552 | 6.35E−05 | 1.66 | A |
| | | | | A = 0.574 | A = 0.448 | | | |
| 8006156 | 206796 | 71272946 | A/G | A = 0.456 | A = 0.583 | 0.000459 | 1.67 | G |
| | | | | G = 0.544 | G = 0.417 | | | |
| 1468662 | 207633 | 71273783 | A/G | A = 0.961 | A = 0.932 | 0.0674 | 0.56 | A |
| | | | | G = 0.039 | G = 0.068 | | | |
| 11627048 | 207723 | 71273873 | G/A | G = 0.791 | G = 0.781 | 0.714 | 0.94 | G |
| | | | | A = 0.209 | A = 0.219 | | | |
| 6574098 | 208026 | 71274176 | T/C | T = 0.122 | T = 0.152 | 0.199 | 1.29 | C |
| | | | | C = 0.878 | C = 0.848 | | | |
| 12433760 | 208627 | 71274777 | C/T | C = 0.695 | C = 0.668 | 0.462 | 0.88 | C |
| | | | | T = 0.305 | T = 0.332 | | | |
| 12433780 | 208662 | 71274812 | C/T | C = 0.102 | C = 0.072 | 0.107 | 0.68 | C |
| | | | | T = 0.898 | T = 0.928 | | | |
| 12434506 | 209109 | 71275259 | T/A | T = 0.906 | T = 0.946 | 0.0611 | 1.81 | A |
| | | | | A = 0.094 | A = 0.054 | | | |
| 12434673 | 209742 | 71275892 | T/C | T = 0.976 | T = 0.998 | 0.0508 | 10.27 | C |
| | | | | C = 0.024 | C = 0.002 | | | |
| 12431400 | 209750 | 71275900 | T/C | T = 0.335 | T = 0.233 | 0.00048 | 0.60 | T |
| | | | | C = 0.665 | C = 0.767 | | | |
| 12431384 | 209817 | 71275967 | G/A | G = 0.173 | G = 0.101 | 0.00147 | 0.54 | G |
| | | | | A = 0.827 | A = 0.899 | | | |
| 4903067 | 210191 | 71276341 | C/T | C = 0.449 | C = 0.408 | 0.192 | 0.85 | C |
| | | | | T = 0.551 | T = 0.592 | | | |
| 2332920 | 210349 | 71276499 | G/A | G = 0.57 | G = | | | |
| | | | | A = 0.430 | A = | | | |
| 2215591 | 210724 | 71276874 | A/G | A = 0.111 | A = 0.146 | 0.143 | 1.36 | G |
| | | | | G = 0.889 | G = 0.854 | | | |
| 12433064 | 211537 | 71277687 | C/A | C = 0.95 | C = 0.952 | 0.867 | 1.06 | A |
| | | | | A = 0.050 | A = 0.048 | | | |
| 12436263 | 211551 | 71277701 | T/G | T = 0.973 | T = 0.994 | 0.2 | 4.13 | G |
| | | | | G = 0.027 | G = 0.006 | | | |
| 12433097 | 211659 | 71277809 | G/A | G = 0.202 | G = 0.118 | 0.00184 | 0.53 | G |
| | | | | A = 0.798 | A = 0.882 | | | |
| 12433184 | 211757 | 71277907 | G/T | G = 0.854 | G = 0.92 | 0.0033 | 1.96 | T |
| | | | | T = 0.146 | T = 0.080 | | | |
| 8015900 | 211821 | 71277971 | A/T | A = 0.004 | A = 0.003 | 0.907 | 0.72 | A |
| | | | | T = 0.996 | T = 0.997 | | | |
| 11296981 | 212236 | 71278386 | T/— | T = 0.819 | T = 0.796 | 0.413 | 0.87 | T |
| | | | | — = 0.181 | — = 0.204 | | | |
| 11344025 | 212237 | 71278387 | T/— | T = 0.817 | T = 0.798 | 0.511 | 0.89 | T |
| | | | | — = 0.183 | — = 0.202 | | | |
| 11464204 | 212442 | 71278592 | —/A | — = 1.000 | — = 1.000 | 0.99 | 1.43 | A |
| | | | | A = 0.000 | A = 0.000 | | | |
| 11441172 | 212445 | 71278595 | —/T | — = 0.281 | — = 0.296 | 0.588 | 1.08 | T |
| | | | | T = 0.719 | T = 0.704 | | | |
| 11381807 | 212455 | 71278605 | T/— | T = 0.865 | T = 0.844 | 0.339 | 0.84 | T |
| | | | | — = 0.135 | — = 0.156 | | | |
| 10873251 | 212730 | 71278880 | G/A | G = 0.093 | G = 0.076 | 0.361 | 0.80 | G |
| | | | | A = 0.907 | A = 0.924 | | | |
| 2109794 | 212746 | 71278896 | T/C | T = 0.301 | T = 0.317 | 0.58 | 1.08 | C |
| | | | | C = 0.699 | C = 0.683 | | | |
| 10873252 | 212836 | 71278986 | T/C | T = 0.809 | T = 0.795 | 0.604 | 0.92 | T |
| | | | | C = 0.191 | C = 0.205 | | | |
| 4520784 | 212886 | 71279036 | G/A | G = 0 | G = | | | |
| | | | | A = 1.000 | A = | | | |
| 2877820 | 213028 | 71279178 | A/T | A = 0.005 | A = 0.002 | 0.7 | 0.30 | A |
| | | | | T = 0.995 | T = 0.998 | | | |
| 2877821 | 213029 | 71279179 | A/T | A = 0.222 | A = 0.138 | 0.000936 | 0.56 | A |
| | | | | T = 0.778 | T = 0.862 | | | |
| 4569195 | 213095 | 71279245 | C/G | C = 0.888 | C = 0.944 | 0.0116 | 2.11 | G |
| | | | | G = 0.112 | G = 0.056 | | | |
| 11628905 | 214247 | 71280397 | A/C | A = 0.008 | A = 0.060 | 0.0167 | 8.40 | C |
| | | | | C = 0.992 | C = 0.940 | | | |
| 2191822 | 214807 | 71280957 | T/C | T = 0.104 | T = 0.162 | 0.0117 | 1.67 | C |
| | | | | C = 0.896 | C = 0.838 | | | |
| 2191821 | 214921 | 71281071 | A/C | A = 0.574 | A = 0.582 | 0.794 | 1.04 | C |
| | | | | C = 0.426 | C = 0.418 | | | |
| 11464689 | 215163 | 71281313 | T/— | T = 0.52 | T = 0.484 | 0.254 | 0.86 | T |
| | | | | — = 0.480 | — = 0.516 | | | |
| 12431959 | 215406 | 71281556 | G/A | G = 0.747 | G = 0.74 | 0.82 | 0.97 | G |
| | | | | A = 0.253 | A = 0.260 | | | |
| 4903068 | 216069 | 71282219 | A/G | A = 0.457 | A = 0.492 | 0.273 | 1.15 | G |
| | | | | G = 0.543 | G = 0.508 | | | |
| 1544579 | 216849 | 71282999 | T/C | T = 0.507 | T = 0.522 | 0.64 | 1.06 | C |
| | | | | C = 0.493 | C = 0.478 | | | |
| 7155879 | 217130 | 71283280 | G/T | G = 0.942 | G = 0.971 | 0.0802 | 2.05 | T |
| | | | | T = 0.058 | T = 0.029 | | | |
| 12433603 | 217143 | 71283293 | C/G | C = 0.898 | C = 0.939 | 0.0273 | 1.75 | G |
| | | | | G = 0.102 | G = 0.061 | | | |
| 11351432 | 217657 | 71283807 | A/— | A = 0.261 | A = 0.287 | 0.387 | 1.14 | — |
| | | | | — = 0.739 | — = 0.713 | | | |
| 11448438 | 217725 | 71283875 | —/G | — = 0.022 | — = 0.092 | 0.000309 | 4.52 | G |
| | | | | G = 0.978 | G = 0.908 | | | |
| 4243643 | 218435 | 71284585 | G/A | G = 0.617 | G = 0.578 | 0.257 | 0.85 | G |
| | | | | A = 0.383 | A = 0.422 | | | |
| 4140952 | 218717 | 71284867 | T/C | T = 0.437 | T = 0.462 | 0.43 | 1.11 | C |
| | | | | C = 0.563 | C = 0.538 | | | |
| 8005372 | 218812 | 71284962 | C/T | C = 0 | C = 0.001 | 0.903 | | T |
| | | | | T = 1.000 | T = 0.999 | | | |
| 8004109 | 218826 | 71284976 | T/C | T = 0.002 | T = 0.002 | 0.966 | 0.77 | T |
| | | | | C = 0.998 | C = 0.998 | | | |
| 8008398 | 218872 | 71285022 | A/C | A = 0.616 | A = 0.569 | 0.181 | 0.82 | A |
| | | | | C = 0.384 | C = 0.431 | | | |
| 8009692 | 218890 | 71285040 | T/C | T = 0.817 | T = 0.744 | 0.0353 | 0.65 | T |
| | | | | C = 0.183 | C = 0.256 | | | |
| 2332921 | 218944 | 71285094 | C/G | C = 0.999 | C = 1.000 | 0.932 | 1.94 | G |
| | | | | G = 0.001 | G = 0.000 | | | |
| 12050320 | 219229 | 71285379 | A/G | A = 0 | A = 0.001 | 0.949 | | G |
| | | | | G = 1.000 | G = 0.999 | | | |
| 12050323 | 219300 | 71285450 | A/G | A = 0.001 | A = 0.001 | 0.967 | 0.68 | A |
| | | | | G = 0.999 | G = 0.999 | | | |
| 8010316 | 219757 | 71285907 | A/G | A = 0.62 | A = 0.607 | 0.703 | 0.95 | A |
| | | | | G = 0.380 | G = 0.393 | | | |
| 7154293 | 220533 | 71286683 | T/C | T = 0.551 | T = 0.558 | 0.837 | 1.03 | C |
| | | | | C = 0.449 | C = 0.442 | | | |
| 12147969 | 221534 | 71287684 | C/T | C = 0.857 | C = 0.844 | 0.604 | 0.90 | C |
| | | | | T = 0.143 | T = 0.156 | | | |
| 2215590 | 221632 | 71287782 | G/A | G = 0.732 | G = 0.712 | 0.543 | 0.91 | G |
| | | | | A = 0.268 | A = 0.288 | | | |
| 4265749 | 222234 | 71288384 | C/T | C = 0.942 | C = 0.992 | 0.0263 | 7.44 | T |
| | | | | T = 0.058 | T = 0.008 | | | |
| 1004552 | 222241 | 71288391 | C/T | C = 0.605 | C = 0.623 | 0.582 | 1.08 | T |
| | | | | T = 0.395 | T = 0.377 | | | |
| 4307892 | 222458 | 71288608 | G/A | G = 0.845 | G = 0.92 | 0.000389 | 2.10 | A |
| | | | | A = 0.155 | A = 0.080 | | | |
| 12431973 | 222735 | 71288885 | T/G | T = | T = 1.000 | | | |
| | | | | G = | G = 0 | | | |
| 12431975 | 222749 | 71288899 | A/G | A = 0.808 | A = 0.747 | 0.0315 | 0.70 | A |
| | | | | G = 0.192 | G = 0.253 | | | |
| 767874 | 223187 | 71289337 | T/C | T = 1.000 | T = 1.000 | 0.942 | 16.74 | C |
| | | | | C = 0.000 | C = 0.000 | | | |
| 11628597 | 226626 | 71292776 | G/C | G = 0.799 | G = 0.824 | 0.326 | 1.18 | C |
| | | | | C = 0.201 | C = 0.176 | | | |
| 10129371 | 226865 | 71293015 | A/G | A = 0.59 | A = 0.532 | 0.0655 | 0.79 | A |
| | | | | G = 0.410 | G = 0.468 | | | |
| 4903069 | 227548 | 71293698 | A/C | A = 0.928 | A = 0.932 | 0.828 | 1.06 | C |
| | | | | C = 0.072 | C = 0.068 | | | |
| 4903070 | 227690 | 71293840 | A/G | A = 0.572 | A = 0.576 | 0.883 | 1.02 | G |
| | | | | G = 0.428 | G = 0.424 | | | |
| 4903071 | 227815 | 71293965 | G/T | G = 0.692 | G = 0.752 | 0.0364 | 1.35 | T |
| | | | | T = 0.308 | T = 0.248 | | | |
| 11622224 | 228456 | 71294606 | T/C | T = 0.661 | T = 0.67 | 0.754 | 1.04 | C |
| | | | | C = 0.339 | C = 0.330 | | | |
| 10459455 | 229025 | 71295175 | G/A | G = 0.709 | G = 0.705 | 0.879 | 0.98 | G |
| | | | | A = 0.291 | A = 0.295 | | | |
| 9323577 | 229085 | 71295235 | C/T | C = 0.654 | C = 0.599 | 0.169 | 0.79 | C |
| | | | | T = 0.346 | T = 0.401 | | | |
| 10624648 | 231757 | 71297907 | TTG/— | TTG = 0.998 | TTG = 0.985 | 0.21 | 0.15 | TTG |
| | | | | — = 0.002 | — = 0.015 | | | |
| 3058953 | 231762 | 71297912 | GTT/— | GTT = 0.995 | GTT = 0.976 | 0.14 | 0.22 | GTT |
| | | | | — = 0.005 | — = 0.024 | | | |
| 11158981 | 232727 | 71298877 | T/G | T = 0.716 | T = 0.689 | 0.345 | 0.88 | T |
| | | | | G = 0.284 | G = 0.311 | | | |
| 11158982 | 232955 | 71299105 | T/G | T = 0.399 | T = 0.421 | 0.496 | 1.09 | G |
| | | | | G = 0.601 | G = 0.579 | | | |
| 11158983 | 233302 | 71299452 | G/T | G = 0.734 | G = 0.71 | 0.407 | 0.89 | G |
| | | | | T = 0.266 | T = 0.290 | | | |
| 1860750 | 233629 | 71299779 | T/A | T = 0.554 | T = 0.591 | 0.309 | 1.16 | A |
| | | | | A = 0.446 | A = 0.409 | | | |
| 1860749 | 233670 | 71299820 | G/A | G = 0.347 | G = 0.477 | 9.51E−05 | 1.71 | A |
| | | | | A = 0.653 | A = 0.523 | | | |
| 1860748 | 233702 | 71299852 | A/C | A = 0.108 | A = 0.184 | 0.00235 | 1.86 | C |
| | | | | C = 0.892 | C = 0.816 | | | |
| 1860747 | 233715 | 71299865 | A/G | A = 0.998 | A = 0.955 | 0.0811 | 0.05 | A |
| | | | | G = 0.002 | G = 0.045 | | | |
| 11419679 | 235827 | 71301977 | —/A | — = 0.597 | — = 0.567 | 0.36 | 0.88 | — |
| | | | | A = 0.403 | A = 0.433 | | | |
| 8011777 | 236951 | 71303101 | T/C | T = 0.993 | T = | | | |
| | | | | C = 0.007 | C = | | | |
| 6574099 | 237157 | 71303307 | A/G | A = 0.368 | A = 0.363 | 0.879 | 0.98 | A |
| | | | | G = 0.632 | G = 0.637 | | | |
| 8010957 | 237317 | 71303467 | A/G | A = 0.09 | A = 0.199 | 0.000106 | 2.53 | G |
| | | | | G = 0.910 | G = 0.801 | | | |
| 11626895 | 237363 | 71303513 | G/A | G = 0.744 | G = 0.73 | 0.634 | 0.93 | G |
| | | | | A = 0.256 | A = 0.270 | | | |
| 10151431 | 238866 | 71305016 | T/G | T = 0 | T = 0 | 1 | | |
| | | | | G = 1.000 | G = 1.000 | | | |
| 4903072 | 239789 | 71305939 | C/A | C = 0.451 | C = 0.462 | 0.747 | 1.04 | A |
| | | | | A = 0.549 | A = 0.538 | | | |
| 4589489 | 240170 | 71306320 | T/C | T = 0.001 | T = 0.001 | 0.979 | 1.61 | C |
| | | | | C = 0.999 | C = 0.999 | | | |
| 9671327 | 240430 | 71306580 | G/T | G = 0.828 | G = 0.842 | 0.558 | 1.11 | T |
| | | | | T = 0.172 | T = 0.158 | | | |
| 4899446 | 240454 | 71306604 | C/T | C = 0.552 | C = 0.574 | 0.497 | 1.09 | T |
| | | | | T = 0.448 | T = 0.426 | | | |
| 10144501 | 240688 | 71306838 | T/A | T = 0.001 | T = 0.001 | 0.976 | 0.57 | T |
| | | | | A = 0.999 | A = 0.999 | | | |
| 5809594 | 241414 | 71307564 | TG/— | TG = 0.55 | TG = 0.533 | 0.593 | 0.93 | TG |
| | | | | — = 0.450 | — = 0.467 | | | |
| 720317 | 241424 | 71307574 | A/G | A = 0.3 | A = 0.322 | 0.582 | 1.11 | G |
| | | | | G = 0.700 | G = 0.678 | | | |
| 8014316 | 241741 | 71307891 | G/A | G = 0.001 | G = 0.001 | 0.933 | 2.97 | A |
| | | | | A = 0.999 | A = 0.999 | | | |
| 11158984 | 241768 | 71307918 | T/C | T = 0.438 | T = 0.453 | 0.633 | 1.06 | C |
| | | | | C = 0.562 | C = 0.547 | | | |
| 6420906 | 242360 | 71308510 | C/T | C = 0.007 | C = 0.048 | 0.00105 | 7.74 | T |
| | | | | T = 0.993 | T = 0.952 | | | |
| 8004055 | 242957 | 71309107 | A/T | A = 1.000 | A = 1.000 | 0.986 | 2.23 | T |
| | | | | T = 0.000 | T = 0.000 | | | |
| 12434800 | 243355 | 71309505 | A/G | A = 0.132 | A = 0.069 | 0.00428 | 0.49 | A |
| | | | | G = 0.868 | G = 0.931 | | | |
| 4243644 | 243596 | 71309746 | T/A | T = 0.609 | T = 0.575 | 0.308 | 0.87 | T |
| | | | | A = 0.391 | A = 0.425 | | | |
| 4899447 | 243648 | 71309798 | A/G | A = 0.815 | A = 0.816 | 0.981 | 1.00 | G |
| | | | | G = 0.185 | G = 0.184 | | | |
| 4903073 | 243664 | 71309814 | G/A | G = 0.176 | G = 0.176 | 0.999 | 1.00 | A |
| | | | | A = 0.824 | A = 0.824 | | | |
| 11848634 | 243783 | 71309933 | T/C | T = 0.001 | T = 0 | 0.927 | 0.00 | T |
| | | | | C = 0.999 | C = 1.000 | | | |
| 4899448 | 243819 | 71309969 | T/C | T = 0.792 | T = 0.769 | 0.396 | 0.87 | T |
| | | | | C = 0.208 | C = 0.231 | | | |
| 10131564 | 245765 | 71311915 | A/G | A = 0.72 | A = 0.708 | 0.694 | 0.95 | A |
| | | | | G = 0.280 | G = 0.292 | | | |
| 10134150 | 246089 | 71312239 | T/G | T = 0.713 | T = 0.685 | 0.354 | 0.88 | T |
| | | | | G = 0.287 | G = 0.315 | | | |
| 763388 | 246457 | 71312607 | A/G | A = 0.71 | A = 0.694 | 0.592 | 0.93 | A |
| | | | | G = 0.290 | G = 0.306 | | | |
| 11845938 | 246485 | 71312635 | A/G | A = 0 | A = 0.001 | 0.975 | | G |
| | | | | G = 1.000 | G = 0.999 | | | |
| 11845946 | 246536 | 71312686 | G/T | G = 0.999 | G = 1.000 | 0.905 | 3.40 | T |
| | | | | T = 0.001 | T = 0.000 | | | |
| 11845915 | 246586 | 71312736 | T/C | T = 0.004 | T = 0.002 | 0.837 | 0.49 | T |
| | | | | C = 0.996 | C = 0.998 | | | |
| 10137463 | 247356 | 71313506 | A/C | A = 0.998 | A = 0.998 | 0.989 | 1.05 | C |
| | | | | C = 0.002 | C = 0.002 | | | |
| 6574100 | 247573 | 71313723 | T/A | T = 0.409 | T = 0.418 | 0.767 | 1.04 | A |
| | | | | A = 0.591 | A = 0.582 | | | |
| 7140344 | 248173 | 71314323 | A/G | A = 0 | A = 0.001 | 0.96 | | G |
| | | | | G = 1.000 | G = 0.999 | | | |
| 10646889 | 248915 | 71315065 | AA/— | AA = | AA = 0.604 | | | |
| | | | | — = | — = 0.396 | | | |
| 7146287 | 249344 | 71315494 | C/T | C = 1.000 | C = 1.000 | 0.975 | 0.00 | C |
| | | | | T = 0 | T = 0.000 | | | |
| 5809595 | 250575 | 71316725 | A/— | A = 0.406 | A = 0.384 | 0.505 | 0.91 | A |
| | | | | — = 0.594 | — = 0.616 | | | |
| 1035099 | 250701 | 71316851 | T/A | T = 0.447 | T = 0.457 | 0.781 | 1.04 | A |
| | | | | A = 0.553 | A = 0.543 | | | |
| 7159877 | 251260 | 71317410 | T/G | T = 0.291 | T = 0.329 | 0.211 | 1.19 | G |
| | | | | G = 0.709 | G = 0.671 | | | |
| 7142579 | 251858 | 71318008 | G/A | G = 0.037 | G = 0.075 | 0.0275 | 2.10 | A |
| | | | | A = 0.963 | A = 0.925 | | | |
| 12431762 | 251981 | 71318131 | G/A | G = 0.867 | G = 0.871 | 0.855 | 1.04 | A |
| | | | | A = 0.133 | A = 0.129 | | | |
| 12431764 | 251990 | 71318140 | G/A | G = 0.611 | G = 0.595 | 0.612 | 0.94 | G |
| | | | | A = 0.389 | A = 0.405 | | | |
| 10647999 | 252326 | 71318476 | AGAAA | AGAAA | AGAAA | 0.936 | 0.99 | AGAAA |
| | | | GAAAG/— | GAAAG = 0.492 | GAAAG = 0.489 | | | GAAAG |
| | | | | — = 0.508 | — = 0.511 | | | |
| 6574101 | 252727 | 71318877 | C/T | C = 0.737 | C = 0.707 | 0.313 | 0.86 | C |
| | | | | T = 0.263 | T = 0.293 | | | |
| 6574102 | 252946 | 71319096 | T/C | T = 0.747 | T = 0.762 | 0.585 | 1.09 | C |
| | | | | C = 0.253 | C = 0.238 | | | |
| 1861162 | 254199 | 71320349 | T/C | T = 0.513 | T = 0.523 | 0.787 | 1.04 | C |
| | | | | C = 0.487 | C = 0.477 | | | |
| 12432972 | 254985 | 71321135 | T/C | T = 1.000 | T = 0.999 | 0.953 | 0.58 | T |
| | | | | C = 0.000 | C = 0.001 | | | |
| 10146134 | 255324 | 71321474 | A/T | A = 0.69 | A = 0.706 | 0.598 | 1.08 | T |
| | | | | T = 0.310 | T = 0.294 | | | |
| 10146616 | 255686 | 71321836 | A/C | A = 0.858 | A = 0.84 | 0.448 | 0.87 | A |
| | | | | C = 0.142 | C = 0.160 | | | |
| 10146769 | 255718 | 71321868 | A/G | A = 0.052 | A = 0.081 | 0.0933 | 1.62 | G |
| | | | | G = 0.948 | G = 0.919 | | | |
| 8018936 | 256321 | 71322471 | G/A | G = | G = 0.995 | | | |
| | | | | A = | A = 0.005 | | | |
| 10483849 | 257562 | 71323712 | G/A | G = 0.302 | G = 0.291 | 0.72 | 0.95 | G |
| | | | | A = 0.698 | A = 0.709 | | | |
| 2160137 | 258843 | 71324993 | T/C | T = 0.842 | T = 0.811 | 0.242 | 0.81 | T |
| | | | | C = 0.158 | C = 0.189 | | | |
| 2192595 | 258880 | 71325030 | C/A | C = 0.861 | C = 0.834 | 0.422 | 0.81 | C |
| | | | | A = 0.139 | A = 0.166 | | | |
| 2192594 | 259060 | 71325210 | A/G | A = 0.374 | A = 0.383 | 0.789 | 1.04 | G |
| | | | | G = 0.626 | G = 0.617 | | | |
| 11271695 | 261590 | 71327740 | TCCATAT | TCCATATG | TCCATAT | 0.947 | 0.79 | TCCATATGG |
| | | | GGCTGAG | GCTGAGGA | GGCTGAG | | | CTGAGGAGG |
| | | | GAGG/— | GG = 0.999 | GAGG = 0.998 | | | |
| | | | | — = 0.001 | — = 0.002 | | | |
| 10747301 | 262088 | 71328238 | G/C | G = 0.995 | G = 0.986 | 0.42 | 0.37 | G |
| | | | | C = 0.005 | C = 0.014 | | | |
| 12050363 | 262345 | 71328495 | C/G | C = 0.993 | C = 0.975 | 0.232 | 0.28 | C |
| | | | | G = 0.007 | G = 0.025 | | | |
| 12050368 | 262368 | 71328518 | G/A | G = 0.947 | G = 0.945 | 0.929 | 0.97 | G |
| | | | | A = 0.053 | A = 0.055 | | | |
| 12432949 | 263858 | 71330008 | A/G | A = 0.606 | A = 0.601 | 0.872 | 0.98 | A |
| | | | | G = 0.394 | G = 0.399 | | | |
| 7401375 | 263995 | 71330145 | T/A | T = 1.000 | T = 0.996 | 0.586 | 0.02 | T |
| | | | | A = 0.000 | A = 0.004 | | | |
| 8019682 | 265195 | 71331345 | G/A | G = 0.848 | G = 0.812 | 0.293 | 0.77 | G |
| | | | | A = 0.152 | A = 0.188 | | | |
| 8021248 | 265620 | 71331770 | T/C | T = 0.597 | T = 0.624 | 0.426 | 1.12 | C |
| | | | | C = 0.403 | C = 0.376 | | | |
| 11158985 | 265833 | 71331983 | T/A | T = 0.242 | T = 0.24 | 0.962 | 0.99 | T |
| | | | | A = 0.758 | A = 0.760 | | | |
| 10483850 | 266387 | 71332537 | A/G | A = 0.823 | A = 0.86 | 0.142 | 1.32 | G |
| | | | | G = 0.177 | G = 0.140 | | | |
| 8010875 | 267130 | 71333280 | A/G | A = 0.0630 | A = 0.11 | 0.0193 | 1.84 | G |
| | | | | G = 0.937 | G = 0.890 | | | |
| 11626844 | 267468 | 71333618 | T/C | T = 0.424 | T = 0.416 | 0.802 | 0.97 | T |
| | | | | C = 0.576 | C = 0.584 | | | |
| 982972 | 267606 | 71333756 | A/G | A = 0.56 | A = 0.542 | 0.575 | 0.93 | A |
| | | | | G = 0.440 | G = 0.458 | | | |
| 7161198 | 268858 | 71335008 | T/C | T = 0.563 | T = 0.573 | 0.75 | 1.05 | C |
| | | | | C = 0.437 | C = 0.427 | | | |
| 7160347 | 269193 | 71335343 | G/A | G = 0.551 | G = 0.553 | 0.966 | 1.01 | A |
| | | | | A = 0.449 | A = 0.447 | | | |
| 8007139 | 269991 | 71336141 | A/G | A = 0.735 | A = 0.735 | 0.992 | 1.00 | A |
| | | | | G = 0.265 | G = 0.265 | | | |
| 8014483 | 271840 | 71337990 | C/T | C = 0.757 | C = 0.762 | 0.867 | 1.03 | T |
| | | | | T = 0.243 | T = 0.238 | | | |
| 12437072 | 272592 | 71338742 | T/C | T = 0.887 | T = 0.905 | 0.414 | 1.21 | C |
| | | | | C = 0.113 | C = 0.095 | | | |
| 8004767 | 273399 | 71339549 | C/G | C = 0.865 | C = 0.803 | 0.0203 | 0.64 | C |
| | | | | G = 0.135 | G = 0.197 | | | |
| 12588830 | 273504 | 71339654 | A/G | A = 0.304 | A = 0.305 | 0.986 | 1.00 | G |
| | | | | G = 0.696 | G = 0.695 | | | |
| 7158449 | 274050 | 71340200 | T/C | T = 0.001 | T = 0.001 | 0.944 | 0.23 | T |
| | | | | C = 0.999 | C = 0.999 | | | |
| 6574103 | 274182 | 71340332 | C/T | C = 0.033 | C = 0.028 | 0.682 | 0.83 | C |
| | | | | T = 0.967 | T = 0.972 | | | |
| 8020478 | 274275 | 71340425 | C/T | C = 0.999 | C = 0.998 | 0.91 | 0.59 | C |
| | | | | T = 0.001 | T = 0.002 | | | |
| 4903077 | 276293 | 71342443 | C/T | C = 0.971 | C = 0.973 | 0.878 | 1.09 | T |
| | | | | T = 0.029 | T = 0.027 | | | |
| 8012359 | 276645 | 71342795 | G/A | G = 0.292 | G = 0.285 | 0.803 | 0.96 | G |
| | | | | A = 0.708 | A = 0.715 | | | |
| 4899449 | 277166 | 71343316 | A/G | A = 0.927 | A = 1.000 | 2.12E−06 | 113.75 | G |
| | | | | G = 0.073 | G = 0.000 | | | |
| 10690289 | 278290 | 71344440 | AAG/— | AAG = 0.977 | AAG = 0.992 | 0.239 | 2.65 | — |
| | | | | — = 0.023 | — = 0.008 | | | |
| 6574104 | 278646 | 71344796 | G/T | G = 0.959 | G = 0.975 | 0.328 | 1.65 | T |
| | | | | T = 0.041 | T = 0.025 | | | |
| 2110552 | 279022 | 71345172 | A/G | A = 0.747 | A = 0.761 | 0.638 | 1.08 | G |
| | | | | G = 0.253 | G = 0.239 | | | |
| 8008256 | 279073 | 71345223 | G/A | G = 0.497 | G = 0.474 | 0.48 | 0.91 | G |
| | | | | A = 0.503 | A = 0.526 | | | |
| 759283 | 280198 | 71346348 | G/T | G = 0.645 | G = 0.64 | 0.88 | 0.98 | G |
| | | | | T = 0.355 | T = 0.360 | | | |
| 4999177 | 281100 | 71347250 | A/G | A = 0.001 | A = 0.003 | 0.853 | 37.48 | G |
| | | | | G = 0.999 | G = 0.997 | | | |
| 2333006 | 281145 | 71347295 | C/G | C = 0.002 | C = 0.007 | 0.719 | 4.08 | G |
| | | | | G = 0.998 | G = 0.993 | | | |
| 8006178 | 282655 | 71348805 | A/C | A = 0.802 | A = 0.787 | 0.583 | 0.91 | A |
| | | | | C = 0.198 | C = 0.213 | | | |
| 11158986 | 282836 | 71348986 | A/C | A = 0.0630 | A = 0.054 | 0.667 | 0.85 | A |
| | | | | C = 0.937 | C = 0.946 | | | |
| 7150625 | 283537 | 71349687 | C/T | C = 0.999 | C = 0.997 | 0.849 | 0.55 | C |
| | | | | T = 0.001 | T = 0.003 | | | |
| 8007768 | 283976 | 71350126 | T/G | T = 0.0660 | T = 0.078 | 0.659 | 1.21 | G |
| | | | | G = 0.934 | G = 0.922 | | | |
| 8007058 | 284149 | 71350299 | A/G | A = 0.592 | A = | | | |
| | | | | G = 0.408 | G = | | | |
| DPF3-AA | 284742 | 71350892 | C/A | C = 0.86 | C = 0.88 | 0.381 | 1.20 | A |
| | | | | A = 0.140 | A = 0.120 | | | |
| 2215901 | 284840 | 71350990 | C/T | C = 0.966 | C = 0.991 | 0.163 | 3.66 | T |
| | | | | T = 0.034 | T = 0.009 | | | |
| 3814866 | 284912 | 71351062 | T/G | T = 0.774 | T = 0.779 | 0.854 | 1.03 | G |
| | | | | G = 0.226 | G = 0.221 | | | |
| 3814864 | 285091 | 71351241 | T/C | T = 0.464 | T = 0.44 | 0.494 | 0.91 | T |
| | | | | C = 0.536 | C = 0.560 | | | |
| 10605948 | 250079-250082 | 71316232 | CCCC/— | CCCC = 0.649 | CCCC = 0.737 | 0.00471 | 1.51 | — |
| | | | | — = 0.351 | — = 0.263 | | | |

[0396] FIG. 1F shows proximal SNPs in and around the DPF3 region for females. The position of each SNP on the chromosome is presented on the x-axis. The y-axis gives the negative logarithm (base 10) of the p-value comparing the estimated allele in the case group to that of the control group. The minor allele frequency of the control group for each SNP designated by an X or other symbol on the graphs in FIG. 1F can be determined by consulting Table 44. By proceeding down the Table from top to bottom and across the graphs from left to right the allele frequency associated with each symbol shown can be determined.

[0397] To aid the interpretation, multiple lines have been added to the graph. The broken horizontal lines are drawn at two common significance levels, 0.05 and 0.01. The vertical broken lines are drawn every 20 kb to assist in the interpretation of distances between SNPs. Two other lines are drawn to expose linear trends in the association of SNPs to the disease. The light gray line (or generally bottom-most curve) is a nonlinear smoother through the data points on the graph using a local polynomial regression method (W. S. Cleveland, E. Grosse and W. M. Shyu (1992) Local regression models. Chapter 8 of Statistical Models in S eds J. M. Chambers and T. J. Hastie, Wadsworth & Brooks/Cole.). The black line provides a local test for excess statistical significance to identify regions of association. This was created by use of a 10 kb sliding window with 1 kb step sizes. Within each window, a chi-square goodness of fit test was applied to compare the proportion of SNPs that were significant at a test wise level of 0.01, to the proportion that would be expected by chance alone (0.05 for the methods used here). Resulting p-values that were less than 10⁻⁸ were truncated at that value.

[0398] Finally, the gene or genes present in the loci region of the proximal SNPs as annotated by Locus Link (http address: www.ncbi.nlm.nih.gov/LocusLink/) are provided on the graph. The exons and introns of the genes in the covered region are plotted below each graph at the appropriate chromosomal positions. The gene boundary is indicated by the broken horizontal line. The exon positions are shown as thick, unbroken bars. An arrow is place at the 3′ end of each gene to show the direction of transcription.

### Example 17

### LOC145197 Proximal SNPs

[0399] It has been discovered that a polymorphic variation (rs1054745) in the LOC145197 gene is associated with the occurrence of breast cancer (see Examples 1 and 2). Subsequently, SNPs proximal to the incident SNP (rs1054745) were identified and allelotyped in breast cancer sample sets and control sample sets as described in Examples 1 and 2. Approximately 106 allelic variants located within the LOC14197 gene were identified and allelotyped. The polymorphic variants are set forth in Table 45. The chromosome position provided in column four of Table 45 is based on Genome “Build 34” of NCBI's GenBank.

TABLE 45

| | Position in | | Chromosome | Allele | Genome | Deduced |
|---|---|---|---|---|---|---|
| dbSNP rs# | SEQ ID NO: 7 | Chromosome | Position | Variants | Letter | Iupac |
| 2895907 | 225 | 14 | 99854375 | a/c | a | M |
| 2401019 | 505 | 14 | 99854655 | g/a | g | R |
| 2401020 | 5170 | 14 | 99859320 | t/c | c | Y |
| 2401021 | 5183 | 14 | 99859333 | t/c | c | Y |
| 1999611 | 6839 | 14 | 99860989 | t/c | g | R |
| 1999610 | 7016 | 14 | 99861166 | c/t | a | R |
| 1999609 | 7237 | 14 | 99861387 | c/t | g | R |
| 2275016 | 8190 | 14 | 99862340 | c/t | g | R |
| 2275015 | 8357 | 14 | 99862507 | c/t | a | R |
| 3818772 | 8577 | 14 | 99862727 | c/g | c | S |
| 10149458 | 15999 | 14 | 99870149 | c/t | c | Y |
| 7142383 | 17722 | 14 | 99871872 | c/t | c | Y |
| 11343023 | 18543 | 14 | 99872693 | t/— | t | N |
| 11160641 | 21639 | 14 | 99875789 | c/a | c | M |
| 12586334 | 24753 | 14 | 99878903 | c/a | a | M |
| 10142208 | 26289 | 14 | 99880439 | g/a | g | R |
| 7493230 | 27120 | 14 | 99881270 | c/a | a | M |
| 5811036 | 28737 | 14 | 99882887 | a/— | a | N |
| 10151926 | 29562 | 14 | 99883712 | t/a | a | W |
| 12435354 | 30078 | 14 | 99884228 | t/c | t | Y |
| 7151007 | 30974 | 14 | 99885124 | c/t | c | Y |
| 11160642 | 31545 | 14 | 99885695 | t/c | c | Y |
| 11160643 | 31779 | 14 | 99885929 | t/a | t | W |
| 11626687 | 34062 | 14 | 99888212 | t/c | c | Y |
| 4906112 | 34831 | 14 | 99888981 | t/g | t | K |
| 8016071 | 34906 | 14 | 99889056 | g/c | g | S |
| 11623698 | 34934 | 14 | 99889084 | t/g | t | K |
| 7401628 | 34938 | 14 | 99889088 | t/g | t | K |
| 8015995 | 35131 | 14 | 99889281 | g/a | a | R |
| 10873526 | 35511 | 14 | 99889661 | t/c | t | Y |
| 11160644 | 35708 | 14 | 99889858 | a/g | g | R |
| 10134252 | 36071 | 14 | 99890221 | g/c | g | S |
| 1959030 | 36824 | 14 | 99890974 | a/t | t | W |
| 9707396 | 36959 | 14 | 99891109 | t/g | g | K |
| 2401022 | 37335 | 14 | 99891485 | a/t | t | W |
| 4622448 | 37343 | 14 | 99891493 | a/g | g | R |
| 10141019 | 38507 | 14 | 99892657 | c/t | c | Y |
| 10141096 | 38554 | 14 | 99892704 | a/c | c | M |
| 11621063 | 38624 | 14 | 99892774 | c/t | t | Y |
| 12434632 | 38690 | 14 | 99892840 | t/c | c | Y |
| 12100901 | 38744 | 14 | 99892894 | t/c | c | Y |
| 12434655 | 38756 | 14 | 99892906 | t/c | c | Y |
| 9944103 | 39525 | 14 | 99893675 | g/a | g | R |
| 7153189 | 40682 | 14 | 99894832 | g/a | a | R |
| 7158860 | 41181 | 14 | 99895331 | a/g | g | R |
| 12437080 | 41414 | 14 | 99895564 | g/c | g | S |
| 11851768 | 41657 | 14 | 99895807 | g/a | a | R |
| 12431943 | 42821 | 14 | 99896971 | g/a | a | R |
| 4309341 | 45475 | 14 | 99899625 | g/a | g | R |
| 4329858 | 45611 | 14 | 99899761 | g/c | g | S |
| 10690268 | 45763 | 14 | 99899913 | aaa/— | a | N |
| 2401023 | 46038 | 14 | 99900188 | t/c | c | Y |
| 1054745 | 46344 | 14 | 99900494 | g/a | a | R |
| 8019453 | 46669 | 14 | 99900819 | t/c | c | Y |
| 12431510 | 46926 | 14 | 99901076 | g/c | g | S |
| 7141067 | 47069 | 14 | 99901219 | t/c | c | Y |
| 12431547 | 47293 | 14 | 99901443 | g/a | a | R |
| 7142316 | 47602 | 14 | 99901752 | g/a | g | R |
| 1959029 | 49821 | 14 | 99903971 | q/a | c | Y |
| 1959028 | 49875 | 14 | 99904025 | t/c | a | R |
| 11376292 | 51178 | 14 | 99905328 | —/a | g | N |
| 11376755 | 51180 | 14 | 99905330 | a/— | a | N |
| 7145420 | 51772 | 14 | 99905922 | a/g | g | R |
| 8013347 | 51912 | 14 | 99906062 | g/t | t | K |
| 2144070 | 52252 | 14 | 99906402 | t/c | t | Y |
| 11850135 | 52294 | 14 | 99906444 | g/a | g | R |
| 11850138 | 52317 | 14 | 99906467 | a/g | g | R |
| 1955617 | 54548 | 14 | 99908698 | g/a | g | R |
| 11621899 | 54889 | 14 | 99909039 | t/c | c | Y |
| 4900508 | 55377 | 14 | 99909527 | c/a | a | M |
| 4906116 | 55498 | 14 | 99909648 | t/c | c | Y |
| 4906117 | 55622 | 14 | 99909772 | c/t | c | Y |
| 2235972 | 55799 | 14 | 99909949 | c/t | c | Y |
| 2235973 | 55995 | 14 | 99910145 | t/c | c | Y |
| 2235974 | 56042 | 14 | 99910192 | c/a | a | M |
| 2235975 | 56342 | 14 | 99910492 | g/a | g | R |
| 7149416 | 57781 | 14 | 99911931 | t/c | c | Y |
| 11850809 | 57983 | 14 | 99912133 | a/c | c | M |
| 10140476 | 58906 | 14 | 99913056 | t/c | t | Y |
| 12437309 | 59257 | 14 | 99913407 | c/t | c | Y |
| 6575852 | 60926 | 14 | 99915076 | t/g | t | K |
| 4906118 | 61462 | 14 | 99915612 | a/g | a | R |
| 11428825 | 62241 | 14 | 99916391 | —/t | t | N |
| 11450744 | 62541 | 14 | 99916691 | —/t | a | N |
| 1999612 | 63600 | 14 | 99917750 | t/c | g | R |
| 1889368 | 63978 | 14 | 99918128 | g/a | t | Y |
| 1889367 | 63983 | 14 | 99918133 | g/c | c | S |
| 1889366 | 63999 | 14 | 99918149 | g/a | t | Y |
| 3077388 | 64042 | 14 | 99918192 | —/ct | t | N |
| 1889365 | 64276 | 14 | 99918426 | g/a | t | Y |
| 1955615 | 66308 | 14 | 99920458 | a/g | a | R |
| 1569807 | 67400 | 14 | 99921550 | t/c | c | Y |
| 2064491 | 69255 | 14 | 99923405 | c/t | c | Y |
| 2064492 | 69263 | 14 | 99923413 | t/c | t | Y |
| 761532 | 70965 | 14 | 99925115 | c/t | t | Y |
| 1955616 | 71540 | 14 | 99925690 | a/g | g | R |
| 2144065 | 74698 | 14 | 99928848 | g/a | g | R |
| 2144066 | 74746 | 14 | 99928896 | c/t | c | Y |
| 2895908 | 75221 | 14 | 99929371 | a/g | a | R |
| 2401043 | 91289 | 14 | 99945439 | t/a | a | W |
| 1007904 | 91796 | 14 | 99945946 | a/g | g | R |
| 3891113 | 93762 | 14 | 99947912 | c/g | g | S |
| 3891114 | 93780 | 14 | 99947930 | g/c | g | S |
| 730812 | 94242 | 14 | 99948392 | t/g | t | K |
| 1884068 | 94809 | 14 | 99948959 | a/g | g | R |
| 1884069 | 94816 | 14 | 99948966 | c/t | t | Y |

Assay for Verifying Allelotyping SNPs

[0400] The methods used to verify and allelotype the proximal SNPs of Table 45 are the same methods described in Examples 1 and 2 herein. The PCR primers and extend primers used in these assays are probided in Table 46 and Table 47, respectively.

TABLE 46

| | | |
|---|---|---|
| dbSNP rs# | Forward PCR primer | Reverse PCR primer |

| | | |
|---|---|---|
| 2895907 | ACGTTGGATGAGCGAGAACTTATCTCTACC | ACGTTGGATGATCTTCTGACTAGCTGGGAC |
| 2401019 | ACGTTGGATGGTGATGCCAGATACTTCCCG | ACGTTGGATGAGCACTGTGGGTCACTGTGG |
| 2401020 | ACGTTGGATGCATTGTGCCTCAGTTTCCTC | ACGTTGGATGTTATGGAGCCCTTTCCACAG |
| 2401021 | ACGTTGGATGAGCATTGTGCCTCAGTTTCC | ACGTTGGATGTTATGGAGCCCTTTCCACAG |
| 1999611 | ACGTTGGATGTGAAAGCCCTTGGCAGGAGA | ACGTTGGATGAGACACTGGACCTAACTGAG |
| 1999610 | ACGTTGGATGACCACCTCCCCACTATTCTG | ACGTTGGATGAACTCTGAGGTTCCAACCTG |
| 1999609 | ACGTTGGATGACAAAAGGACTCGGATCTGG | ACGTTGGATGAGCTCTAGGGGAATCCTCTC |
| 2275016 | ACGTTGGATGCTAGATCATTGGCCAGTGTG | ACGTTGGATGAAGAGGCATGCCGAAATGAG |
| 2275015 | ACGTTGGATGTGACCTGCACAGCCCGGGAGA | ACGTTGGATGCCAATGAAAGAGGAGATGCG |
| 3818772 | ACGTTGGATGGGTGGCTAGTAGGATGATTG | ACGTTGGATGGCATGGAACCCCACATGTAC |
| 10149458 | ACGTTGGATGTGATCAAGGTTCCATCTTAG | ACGTTGGATGTATCCACCATCGTTCCAAAC |
| 7142383 | ACGTTGGATGCCTGGCTCATTGAAGCATTC | ACGTTGGATGGAAGTTCACATTTCCAAGGG |
| 11343023 | ACGTTGGATGTTTCATGCTTTTGGGACCAG | ACGTTGGATGGATTTCCCTATTTAACTGGC |
| 11160641 | ACGTTGGATGACTTGAGCTCAGGAGTTTGA | ACGTTGGATGTACAGGTTTGTGCCACCATG |
| 12586334 | ACGTTGGATGCTATCCTTCTACCAAAGGAT | ACGTTGGATGTCAGAGTACTAGTCTTGAAC |
| 10142208 | ACGTTGGATGAACAATTCTTCTGACGCTGC | ACGTTGGATGGGCATATACTGTATGGTTCC |
| 7493230 | ACGTTGGATGATCCAGTCCTAGTTCCTTTC | ACGTTGGATGAGTCTCTTCTGGCTGTTTAC |
| 5811036 | ACGTTGGATGGGAGAGATCGCTGGCTTGAT | ACGTTGGATGTTGCAGTGAGCTGAGATTGC |
| 10151926 | ACGTTGGATGCCTCTGTGTTAAGTCTATTC | ACGTTGGATGTAGCACATAGCTAGATACTG |
| 12435354 | ACGTTGGATGACCTTCACTGAGAACACTGG | ACGTTGGATGACCTGGCCAATATGATGAGG |
| 7151007 | ACGTTGGATGTGACACTGAGCATCTTTTCC | ACGTTGGATGGAATAGACACTTCACCAGAG |
| 11160642 | ACGTTGGATGTAGTCCTAGCTACACGGGAG | ACGTTGGATGAGTGCAGTGGCACGATCTTG |
| 11160643 | ACGTTGGATGAAATGCTGGGATTACAGGCG | ACGTTGGATGCTGGGTATAAACCCAAAGGG |
| 11626687 | ACGTTGGATGGGGAATCACAGAAAGTGTCC | ACGTTGGATGCACACGTGGTCATAATGTGC |
| 4906112 | ACGTTGGATGCCGGCCCTTTCTCATTTTTG | ACGTTGGATGATGAACCCAAAACCTGGTTC |
| 8016071 | ACGTTGGATGCAGAGTGGCTGTCAATGAAA | ACGTTGGATGCCTGATCAATCTGTATAGAG |
| 11623698 | ACGTTGGATGAAGAACCAGGTTTTGGGTTC | ACGTTGGATGAAAAAAGACCAGAGTGGCTG |
| 7401628 | ACGTTGGATGAAGAACCAGGTTTTGGGTTC | ACGTTGGATGCAGAGTGGCTGTCAATGAAA |
| 8015995 | ACGTTGGATGACCATTGGGATCGTGTTCAG | ACGTTGGATGCCGCTTAAGTGTTCCTCTAG |
| 10873526 | ACGTTGGATGATCCATTCTCATCACATCCC | ACGTTGGATGACAAACACTACGTCCGTCTG |
| 11160644 | ACGTTGGATGGGACTCCTCAAAACTGTCAG | ACGTTGGATGGTCTCTCTCAGCTTCTCTTG |
| 10134252 | ACGTTGGATGTTTGAACCTGGGAGGTGGAG | ACGTTGGATGTGGAGTCTTGTTCTGTCACC |
| 1959030 | ACGTTGGATGGAGGCACGCATCCAATTCAG | ACGTTGGATGGTGTCAGAGTGAGACTCTGT |
| 9707396 | ACGTTGGATGGGGTTCAAGCAATTCTCCTG | ACGTTGGATGAAATTAGATGGGCGTGGTGG |
| 2401022 | ACGTTGGATGACACAGGACTGTTGCAGTGG | ACGTTGGATGAAGACTACAGAGACTCCAGC |
| 4622448 | ACGTTGGATGTACAGAGACTCCAGCATCTG | ACGTTGGATGTCAGATTTCCAGCCACACAG |
| 10141019 | ACGTTGGATGGTCCATGAGAGACTTCCTTC | ACGTTGGATGGGGAATATTCGTGTCTGGAG |
| 10141096 | ACGTTGGATGACACGGTGCAGAGGGTAAAC | ACGTTGGATGCAAAACCCAGCTCTGACCTC |
| 11621063 | ACGTTGGATGTTTACCCTCTGCACCGTGTG | ACGTTGGATGTGAGAAGCTAACAGCACAGG |
| 12434632 | ACGTTGGATGCTCCTATGGTTAATGTTGGG | ACGTTGGATGGTGCTGTTAGCTTCTCATAC |
| 12100901 | ACGTTGGATGAACTGGAAAATCCCTGCTGC | ACGTTGGATGTGTCAGCTACTCCACTCAAC |
| 12434655 | ACGTTGGATGGGGTCATTATCAAAAAACTGG | ACGTTGGATGCCAACATTAACCATAGGAGAC |
| 9944103 | ACGTTGGATGGCCCAAGGATTTGGGTAAAC | ACGTTGGATGAATGCCGAATCCCTCAAAAG |
| 7153189 | ACGTTGGATGCAAACTTCCAAGATAGACTG | ACGTTGGATGTGACTTGTATTCTCCAATTC |
| 7158860 | ACGTTGGATGGTAAGTTTCATCCTGACCTC | ACGTTGGATGCTCCTTACTGACCTAAGGAG |
| 12437080 | ACGTTGGATGTAAAGAGGGAGACTGGAGAG | ACGTTGGATGCCTTAGTTCAACCCTACCAC |
| 11851768 | ACGTTGGATGACTTTCCTCAGGCCTCTTTG | ACGTTGGATGAAAGGACGTGTATGCTCACC |
| 12431943 | ACGTTGGATGTTCGGGATCTCACAGTCTAG | ACGTTGGATGGGGCCGTACCTCCTTTTAAA |
| 4309341 | ACGTTGGATGAAAGTACTGGGATTACAGGC | ACGTTTGATGAATCTCTTCCTGGGTCTTCG |
| 4329858 | ACGTTGGATGATTCTCTTGCCTCAGTCTCC | ACGTTGGATGCCTGACCGACATGGAGAATC |
| 10690268 | ACGTTGGATGCAAGAGCGAGACTCCGTTAA | ACGTTGGATGTTGATGATGCAGTCTTCGTG |
| 2401023 | ACGTTGGATGGGGACCACTAGAGTCTAAAC | ACGTTGGATGTGTCTGAAGCACCAGGAATG |
| 1054745 | ACGTTGGATGGACTTTTAGGTCTGAGTTGG | ACGTGGATGCTTCCTCTAGCAGTGTATTTC |
| 8019453 | ACGTTGGATGCCAGTCGTTTCAAAAGGAAC | ACGTTGGATGGCTTCAATAGTCTGTAACCC |
| 12431510 | ACGTTGGATGAAATTAGCTGGGCATGGTGG | ACGTTGGATGCCCAGGTTCAAGTGATTCTC |
| 7141067 | ACGTTGGATGTTCTAGATGGAGGCGAAGAG | ACGTTGGATGCAAAGTGCTGGCATTACAGG |
| 12431547 | ACGTTGGATGGCTAACTAACGGCTAATAGG | ACGTTGGATGAAGAAGCTCAATAGGCACTG |
| 7142316 | ACGTTGGATGAGTATTCCAGAGGCTTGTGG | ACGTTGGATGTGACATCTGCCCAGCAGTAC |
| 1959029 | ACGTTGGATGGCTAAGCTCTGCTTGAATTC | ACGTTGGATGCGAGTTGGATTATAGACTGC |
| 1959028 | ACGTTGGATGAGTCTATAATCCAACTCGCC | ACGTTGGATGTGACAGAATGAGACTCTGTC |
| 11376292 | ACGTTGGATGCTGTTTTTTCTGCTTTCTTC | ACGTTGGATGGGCTCCACAATTTTTAAGTG |
| 11376755 | ACGTTGGATGGGCTCCACAATTTTTAAGTG | ACGTTGGATGCTGTTTTTTCTGCTTTCTTC |
| 7145420 | ACGTTGGATGTGCCCTTGGTGAATTTCACG | ACGTTGGATGTACCTAGAAGTGGTAGGGAC |
| 8013347 | ACGTTGGATGGCCGAAGATGTTTTCTACTG | ACGTTGGATGAGCAGCTATCCAGGTTATTC |
| 2144070 | ACGTTGGATGGCCTGCTCTGTACCAGTAAC | ACGTTGGATGTGTCTCACCCAATTTGGCTC |
| 11850135 | ACGTTGGATGGTTTTAGCAGCTCAGAAGGG | ACGTTGGATGCCTCACACAGTTACTGGTAC |
| 11850138 | ACGTTGGATGCCTCACACAGTTACTGGTAC | ACGTTGGATGGTTTTAGCAGCTCAGAAGGG |
| 1955617 | ACGTTGGATGGAAATAGAAGCACTTTGGGT | ACGTTGGATGCTTTTATAATAAAAATCTCTC |
| 11621899 | ACGTTGGATGACTAGGTAAGGGAGTGAATG | ACGTTGGATGTTGGAAGATATTCCTGGCAG |
| 4900508 | ACGTTGGATGCTAAGGTCTTCCTGTCACTC | ACGTTGGATGCCTTTCTTCCCAATTGCATG |
| 4906116 | ACGTTGGATGAAAACCTGCGTGGTTGGATG | ACGTTGGATGCAGGCTGGAGAAGTCTAGAA |
| 4906117 | ACGTTGGATGGCTACATTGAAGAAGGACGG | ACGTTGGATGTGCACGTCTTTAAACACAGC |
| 2235972 | ACGTTGGATGTATCTTTTTTCCCCCATCAG | ACGTTGGATGGTAGGTTCAGGTGTCATTTG |
| 2235973 | ACGTTGGATGCTTCTCGAGGTCAAGGTTTC | ACGTTGGATGGATGGTCAGGTCATCTCATG |
| 2235974 | ACGTTGGATGCCTTGACCTCGAGAAGAAAG | ACGTTGGATGGTATGGCTGGGTAAAAATGC |
| 2235975 | ACGTTGGATGGGTTTTACTGCAAATGTGCG | ACGTTGGATGTAAGTGGTAGGAAATGATAC |
| 7149416 | ACGTTGGATGTTCTTCCCTGACTCCCTAAC | ACGTTGGATGTGGAAGGCATTTCAAGCAGG |
| 11850809 | ACGTTGGATGCAGGGATCTACTCCTTGGTC | ACGTTGGATGGAAGATGCAAGGTCAGCAGG |
| 10140476 | ACGTTGGATGTTTCTAGAAATGCGAGCTGG | ACGTTGGATGGACCCATTTTCCAAATGTCAG |
| 12437309 | ACGTTGGATGCTGTCGAAGTATTGAGCACC | ACGTTGGATGCTGAAGGACCGAACACAATC |
| 6575852 | ACGTTGGATGACCTGGGTGCTGTGCTGCGG | ACGTTGGATGACGTGGGAACCGGGCTGTC |
| 4906118 | ACGTTGGATGCCTCTGAGGTTGCAAATCTG | ACGTTGGATGTGGCGCCCATTTGGCTTTTT |
| 11428825 | ACGTTGGATGAGAGCCCGTCTTTCTCCACA | ACGTTGGATGCCTTCAACCCATCTGGAAAG |
| 11450744 | ACGTTGGATGAAACCCCAGATATTCCCTTG | ACGTTGGATGTGAGATAAAAGACACACAGG |
| 1999612 | ACGTTGGATGACGTTGGAATGCCAGTTTGC | ACGTTGGATGTCCTGGGAATGGGCTTCTAC |
| 1889368 | ACGTTGGATGACCTCTAGAATTTCCTGGCC | ACGTTGGATGCAAGGACAAGTGTCTTAGGG |
| 1889367 | ACGTTGGATGACCTCTAGAATTTCCTGGCC | ACGTTGGATGTGTCGGCGACAAGGACAAGT |
| 1889366 | ACGTTGGATGCCCTGATATCTCTTACTCCC | ACGTTGGATGAGTGTGTTCACGGGCAATGG |
| 3077388 | ACGTTGGATGTGAACGCAGTGTGTTCACGG | ACGTTGGATGAAGACACTTGTCCTTGTCGC |
| 1889365 | ACGTTGGATGCATGCTGCAGCCAAACATTG | ACGTTGGATGTAGGCAAGGCACCATCTCAT |
| 1955615 | ACGTTGGATGCACTGCCCTGATGTCACACA | ACGTTGGATGTGCAGAGTGATAGGGTCAGG |
| 1569807 | ACGTTGGATGCTGCAGAGTTCAAAGATGCG | ACGTTGGATGTCAGGTCCTGGAGTTAAAAG |
| 2064491 | ACGTTGGATGAGTCACCAAAGCTAAGTGCC | ACGTTGGATGACACCGTCTCTGGGCTGAAG |
| 2064492 | ACGTTGGATGACACCGTCTCTGGGCTGAAG | ACGTTGGATGAAGCTAAGTGCCAAGATGCG |
| 761532 | ACGTTGGATGACCTTTAAGCCCAAGTTGAG | ACGTTGGATGACTGGCATGCAGTTGTTACC |
| 1955616 | ACGTTGGATGACCAACTTCCACTCAGAAGC | ACGTTGGATGCAGCATGGCTTCATCTTAAC |
| 2144065 | ACGTTGGATGAAATTAACCCTCGCAGAGGC | ACGTTGGATGGAGAAAGTTCCAGAAGAGGG |
| 2144066 | ACGTTGGATGCCTCTGCGAGGGTTAATTTC | ACGTTGGATGCAGAAACACCCAGAGTGATG |
| 2895908 | ACGTTGGATGAGAGATCAGAGAGAGAGAGC | ACGTTGGATGAAGGTGATTAGGTCAGGAGG |
| 2401043 | ACGTTGGATGGTTACACACTTTCTAGGCTC | ACGTTGGATGTGGGCCCAAACTATCTCTAG |
| 1007904 | ACGTTGGATGAGCGCAGTTGTTTGTCTCTC | ACGTTGGATGCCATGATGATGGAGCAACAG |
| 3891113 | ACGTTGGATGGGGTTTGGAGAAGAAAGGAG | ACGTTGGATGGTGACTCACTGTCTAGTCTG |
| 3891114 | ACGTTGGATGTCCTGTGACTCACTGTCTAG | ACGTTGGATGGAAAGGAGACTGGTTTGGG |
| 730812 | ACGTTGGATGATTGGTGAGGTCTGGCTATG | ACGTTGGATGCCTGTAATCCCAGCACTTTG |
| 1884068 | ACGTTGGATGCCACTGGGAAAAGGCACTT | ACGTTGGATGGTAGGGTTGTTGGGTCATTC |
| 1884069 | ACGTTGGATGCTTTCAGAATAAGGGCCAAC | ACGTTGGATGCTCTCAGACAGCGTTTTAAG |

[0401] TABLE 47

| | | |
|---|---|---|
| dbSNP rs# | Extend Primer | Term Mix |

| | | |
|---|---|---|
| 2895907 | ATCTCTACCAAACAATACAAAAAT | ACT |
| 2401019 | TGCGCAAAGTGCCAGAGCCC | ACG |
| 2401020 | TTCCGTGAATGGGAATG | ACT |
| 2401021 | CCTCAGTTTCCTCTTCC | ACT |
| 1999611 | AGGAGAGCAGCACTCAC | ACT |
| 1999610 | CCCCACTATTCTGATAACC | ACG |
| 1999609 | CAGAGTCCCCATGTGCACGC | ACG |
| 2275016 | GCCAGTGTGGTTGCAATT | ACG |
| 2275015 | AGCCGCTGCCCCAGGTG | ACG |
| 3818772 | TGCTTTGGTGCTCTCTT | ACT |
| 10149458 | CCAAATTTTGGTTGCTTCAAGG | ACG |
| 7142383 | TATAGACATTATCTGACAACACT | ACG |
| 11343023 | GGAGAATCTGCCCAGCTCAT | ACT |
| 11160641 | GCCTGGGTAACATGGTGAAA | CGT |
| 12586334 | AAAAACTTAAGATACATAGGGAC | CGT |
| 10142208 | CTTCTGACGCTGCTAACTAAC | ACG |
| 7493230 | AGTCCTAGTTCCTTTCTGTTTA | CGT |
| 5811036 | TTCCCAACTCTTTTTTTTTTTTTTT | ACT |
| 10151926 | TAGAGAGGATATAGAAAAGGAG | CGT |
| 12435354 | CTGAGAACACTGGTTGAGAGT | ACT |
| 7151007 | TTTTCCTGCCCTTATTTGTCAT | ACG |
| 11160642 | GAACCCAGGAGGCAGAGC | ACT |
| 11160643 | CCAGCCCACATGTGTCTTTAT | CGT |
| 11626687 | CACAGAAAGTGTCCTTTATAAAC | ACT |
| 4906112 | CCCTTTCTCATTTTTGATACTG | ACT |
| 8016071 | AGAGAAAACAAATGAACCCAAAA | ACT |
| 11623698 | GGGTTCATTTGTTTTCTCTATTG | ACT |
| 7401628 | TCATTTGTTTTCTCTATTGTCTG | ACT |
| 8015995 | CAGCTGAATGAAGACACTACA | ACG |
| 10873526 | CCATCAACATGGCTTATCACC | ACT |
| 11160644 | TCAGGGTCCTCAAAAATAAGG | ACT |
| 10134252 | GAGGTGGAGGTTGCAGTGA | ACT |
| 1959030 | ATTCAGCTGATGATCCC | CGT |
| 9707396 | TCTCCTGACTCAGTCTCCC | ACT |
| 2401022 | GGTCAGGCTCTTCAGCG | CGT |
| 4622448 | CCTGGTCTCTTCTCGCTGAA | ACT |
| 10141019 | CTGTCCTGCAAGCAGGGAA | ACG |
| 10141096 | GGTAAACCCAGGCTCACAG | ACT |
| 11621063 | GACAGGTGCTCCGCCAGA | ACG |
| 12434632 | TGTTGGGGTTGAGTGGAGTA | ACT |
| 12100901 | CCTGCTGCGGAGACTATTCA | ACT |
| 12434655 | AACTGGAAAATCCCTGCTGC | ACT |
| 9944103 | GGTAAACACACTCGCAACAG | ACG |
| 7153189 | TAGACTGCCTTTGTATATCTTTT | ACG |
| 7158860 | GCCAACAATGGCTACATCTTTT | ACT |
| 12437080 | GGAATTCTGTAATGTGGGCTG | ACT |
| 11851768 | GGTGCTACCTCTTTAGCCAC | ACG |
| 12431943 | TTTTTGCTTAGCATGGTGGAAA | ACG |
| 4309341 | CCGGGCCTTCCCTAGGTT | ACG |
| 4329858 | CCCGCCACCACGCCCGG | ACT |
| 10690268 | GACTCCGTTAAAAAAAAAAAAAAAA | ACT |
| 2401023 | TCTAAACTTGATAAGGCAAC | ACT |
| 1054745 | TTGGTCCATTAGGGAATTAGA | ACG |
| 8019453 | GGGAAATACTAGGAATGAATACT | ACT |
| 12431510 | GGCATGGTGGCGGGTGC | ACT |
| 7141067 | CATTGGCCGGGCATGGTG | ACT |
| 12431547 | TAGGGGAGAGCTAAAAACAAC | ACG |
| 7142316 | TGATGGCAGCATCTTATTACAT | ACG |
| 1959029 | CTTGAATTCTCATTGAGCATCT | ACG |
| 1959028 | TAATCCAACTCGCCTTCTCC | ACT |
| 11376292 | TAAAAAGTGGTAGACTTTTTTTTTT | ACG |
| 11376755 | AAGAATTTGCCCAGAAAAAAAAAA | ACT |
| 7145420 | ACCCGAAGCTAGGGTCGC | ACT |
| 8013347 | GAATATTCTATGATGTTAGGTGT | CGT |
| 2144070 | GAGGTGCTGGGGAGTGTGT | ACT |
| 11850135 | GCAAACATCCCCGGGAGC | ACG |
| 11850138 | CCCGGGGATGTTTGCTGAA | ACT |
| 1955617 | GATTTAAATGGGAGTATGATGTA | ACG |
| 11621899 | GGGGATGGTGAATGACCTCT | ACT |
| 4900508 | AGAGTGACCATTCCTATGTTC | CGT |
| 4906116 | TGCGTGGTTGGATGTTTTTCA | ACT |
| 4906117 | GAAGAAGGACGGTGACTCG | ACG |
| 2235972 | TCCCCCATCAGGACACC | ACG |
| 2235973 | GGTCAAGGTTTCAAAAATGG | ACT |
| 2235974 | GAGAAGAAAGAGAGAAAGCTTTTA | CGT |
| 2235975 | TGCGAACGATCCATCTA | ACG |
| 7149416 | TTTCCCCCACTGTCTCTGG | ACT |
| 11850809 | GGTCCCTGGTCTCTGGTTTT | ACT |
| 10140476 | ATGCGAGCTGGATTTTTAAACA | ACT |
| 12437309 | GAAGACTGTGGGAGTTTTGG | ACG |
| 6575852 | TGCGGCCAGGCAGAGCC | ACT |
| 4906118 | CAGTTAGGATGCGGGAGGC | ACT |
| 11428825 | CTTTCTCCACACCATTTTTTTTT | ACG |
| 11450744 | GATATTCCCTTGGTTAAAAAAAAAA | CGT |
| 1999612 | AGGTTTTGTGTCATCTAGC | ACT |
| 1889368 | CCTGCCACCCTGATATC | ACG |
| 1889367 | GCCACCCTGATATCTCTTA | ACT |
| 1889366 | CTTACTCCCTAAGACACTTG | ACG |
| 3077388 | CGGGCAATGGGCAGAGAG | CGT |
| 1889365 | AAACATTGACACCCCAAGTTC | ACG |
| 1955615 | CACTACCCTGATCTCACACA | ACT |
| 1569807 | AAGGCAGTTTGGAGAGC | ACT |
| 2064491 | AGCTAAGTGCCAAGATG | ACG |
| 2064492 | GGCACCAGGAGCAGGTCCTC | ACT |
| 761532 | TTCTGTCACTCACCCCC | ACG |
| 1955616 | GACAGGGTCTTTGCACAC | ACT |
| 2144065 | AGGCCGCCTCTTTATCA | ACG |
| 2144066 | AATTTCAGTGTCAACTTGG | ACG |
| 2895908 | TCTCTTCTTATAAGGGCACT | ACT |
| 2401043 | TAGCTTTATAGGACAGGTCTAG | CGT |
| 1007904 | CAGTTGTTTGTCTCTCTTGCCCA | ACT |
| 3891113 | AGAAAGGAGACTGGTTTGGG | ACT |
| 3891114 | CTGTCTAGTCTGTTCACTTTC | ACT |
| 730812 | AGCGATCCTCCCACCTC | ACT |
| 1884068 | CAGAATAAGGGCCAACT | ACT |
| 1884069 | ATAAGGGCCAACTGATGTAT | ACG |

Genetic Analysis of Allelotyping Results

[0402] Allelotyping results are shown for cases and controls in Table 48. The allele frequency for the A2 allele is noted sixth columns for breast cancer pools and control pools, respectively, where “AF” is allele frequency. SNPs with blank allele frequencies were untyped.

TABLE 48

| | | | | | | | | Breast |
|---|---|---|---|---|---|---|---|---|
| | Position in | | | | | | | Cancer |
| | SEQ ID | Chromosome | A1/A2 | | | | | Associated |
| dbSNP rs# | NO: 7 | Position | Allele | Case AF | Control AF | p-Value | OR | Allele |
| 2895907 | 225 | 99854375 | A/C | A = 0.342 | A = 0.364 | 0.464 | 1.10 | C |
| | | | | C = 0.658 | C = 0.636 | | | |
| 2401019 | 505 | 99854655 | G/A | G = 0.282 | G = 0.303 | 0.477 | 1.10 | A |
| | | | | A = 0.718 | A = 0.697 | | | |
| 2401020 | 5170 | 99859320 | T/C | T = | T = 0.239 | | | |
| | | | | C = | C = 0.761 | | | |
| 2401021 | 5183 | 99859333 | T/C | T = 0.681 | T = 0.66 | 0.503 | 0.91 | T |
| | | | | C = 0.319 | C = 0.340 | | | |
| 1999611 | 6839 | 99860989 | T/C | T = 0.951 | T = 0.94 | 0.489 | 0.80 | T |
| | | | | C = 0.049 | C = 0.060 | | | |
| 1999610 | 7016 | 99861166 | C/T | C = 0.598 | C = 0.592 | 0.842 | 0.97 | C |
| | | | | T = 0.402 | T = 0.408 | | | |
| 1999609 | 7237 | 99861387 | C/T | C = 0.434 | C = | | | |
| | | | | T = 0.566 | T = | | | |
| 2275016 | 8190 | 99862340 | C/T | C = 0.609 | C = 0.642 | 0.316 | 1.15 | T |
| | | | | T = 0.391 | T = 0.358 | | | |
| 2275015 | 8357 | 99862507 | C/T | C = 0.291 | C = 0.31 | 0.524 | 1.09 | T |
| | | | | T = 0.709 | T = 0.690 | | | |
| 3818772 | 8577 | 99862727 | C/G | C = 0.705 | C = 0.665 | 0.177 | 0.83 | C |
| | | | | G = 0.295 | G = 0.335 | | | |
| 10149458 | 15999 | 99870149 | C/T | C = 1 | C = 1 | 0.913 | 0.00 | C |
| | | | | T = 0 | T = 0.000 | | | |
| 7142383 | 17722 | 99871872 | C/T | C = 0.991 | C = 0.972 | 0.0879 | 0.31 | C |
| | | | | T = 0.009 | T = 0.028 | | | |
| 11343023 | 18543 | 99872693 | T/— | T = 1 | T = 1 | 1 | | |
| | | | | — = 0 | — = 0 | | | |
| 11160641 | 21639 | 99875789 | C/A | C = 1 | C = 0.999 | 0.921 | 0.44 | C |
| | | | | A = 0.000 | A = 0.001 | | | |
| 12586334 | 24753 | 99878903 | C/A | C = 0.435 | C = 0.393 | 0.259 | 0.84 | C |
| | | | | A = 0.565 | A = 0.607 | | | |
| 10142208 | 26289 | 99880439 | G/A | G = 0.957 | G = 0.972 | 0.505 | 1.55 | A |
| | | | | A = 0.043 | A = 0.028 | | | |
| 7493230 | 27120 | 99881270 | C/A | C = 0.001 | C = 0.001 | 0.939 | 5.70 | A |
| | | | | A = 0.999 | A = 0.999 | | | |
| 5811036 | 28737 | 99882887 | A/— | A = 0.511 | A = 0.536 | 0.424 | 1.11 | — |
| | | | | — = 0.489 | — = 0.464 | | | |
| 10151926 | 29562 | 99883712 | T/A | T = 0.001 | T = 0.001 | 0.988 | 0.32 | T |
| | | | | A = 0.999 | A = 0.999 | | | |
| 12435354 | 30078 | 99884228 | T/C | T = 1 | T = 1 | 0.998 | 1.10 | C |
| | | | | C = 0.000 | C = 0.000 | | | |
| 7151007 | 30974 | 99885124 | C/T | C = 0.535 | C = 0.496 | 0.267 | 0.85 | C |
| | | | | T = 0.465 | T = 0.504 | | | |
| 11160642 | 31545 | 99885695 | T/C | T = 1 | T = 0.999 | 0.896 | 0.46 | T |
| | | | | C = 0.000 | C = 0.001 | | | |
| 11160643 | 31779 | 99885929 | T/A | T = 0.553 | T = 0.5 | 0.0966 | 0.81 | T |
| | | | | A = 0.447 | A = 0.500 | | | |
| 11626687 | 34062 | 99888212 | T/C | T = | T = 0.54 | | | |
| | | | | C = | C = 0.460 | | | |
| 4906112 | 34831 | 99888981 | T/G | T = 1 | T = 1 | 0.991 | 0.76 | T |
| | | | | G = 0.000 | G = 0.000 | | | |
| 8016071 | 34906 | 99889056 | G/C | G = 0.224 | G = 0.273 | 0.15 | 1.31 | C |
| | | | | C = 0.776 | C = 0.727 | | | |
| 11623698 | 34934 | 99889084 | T/G | T = 1 | T = 1 | 0.968 | 0.68 | T |
| | | | | G = 0.000 | G = 0.000 | | | |
| 7401628 | 34938 | 99889088 | T/G | T = 1 | T = 1 | 1 | | |
| | | | | G = 0 | G = 0 | | | |
| 8015995 | 35131 | 99889281 | G/A | G = 0.547 | G = 0.562 | 0.643 | 1.06 | A |
| | | | | A = 0.453 | A = 0.438 | | | |
| 10873526 | 35511 | 99889661 | T/C | T = 0.579 | T = 0.548 | 0.334 | 0.88 | T |
| | | | | C = 0.421 | C = 0.452 | | | |
| 11160644 | 35708 | 99889858 | A/G | A = 0.661 | A = 0.673 | 0.715 | 1.05 | G |
| | | | | G = 0.339 | G = 0.327 | | | |
| 10134252 | 36071 | 99890221 | G/C | G = 0.003 | G = 0.004 | 0.829 | 1.84 | C |
| | | | | C = 0.997 | C = 0.996 | | | |
| 1959030 | 36824 | 99890974 | A/T | A = 0.029 | A = 0.03 | 0.908 | 1.06 | T |
| | | | | T = 0.971 | T = 0.970 | | | |
| 9707396 | 36959 | 99891109 | T/G | T = 0 | T = 0 | 1 | | |
| | | | | G = 1 | G = 1 | | | |
| 2401022 | 37335 | 99891485 | A/T | A = 0.561 | A = 0.563 | 0.942 | 1.01 | T |
| | | | | T = 0.439 | T = 0.437 | | | |
| 4622448 | 37343 | 99891493 | A/G | A = 0.001 | A = 0.001 | 0.993 | 1.32 | G |
| | | | | G = 0.999 | G = 0.999 | | | |
| 10141019 | 38507 | 99892657 | C/T | C = 1 | C = 1 | 0.974 | 0.71 | C |
| | | | | T = 0.000 | T = 0.000 | | | |
| 10141096 | 38554 | 99892704 | A/C | A = 0.002 | A = 0.003 | 0.908 | 1.74 | C |
| | | | | C = 0.998 | C = 0.997 | | | |
| 11621063 | 38624 | 99892774 | C/T | C = 0.5 | C = 0.445 | 0.11 | 0.80 | C |
| | | | | T = 0.500 | T = 0.555 | | | |
| 12434632 | 38690 | 99892840 | T/C | T = 0.371 | T = 0.382 | 0.726 | 1.05 | C |
| | | | | C = 0.629 | C = 0.618 | | | |
| 12100901 | 38744 | 99892894 | T/C | T = 0.166 | T = 0.211 | 0.136 | 1.34 | C |
| | | | | C = 0.834 | C = 0.789 | | | |
| 12434655 | 38756 | 99892906 | T/C | T = 0.408 | T = 0.428 | 0.532 | 1.09 | C |
| | | | | C = 0.592 | C = 0.572 | | | |
| 9944103 | 39525 | 99893675 | G/A | G = 0.816 | G = 0.819 | 0.924 | 1.02 | A |
| | | | | A = 0.184 | A = 0.181 | | | |
| 7153189 | 40682 | 99894832 | G/A | G = 0.001 | G = 0.001 | 0.986 | 1.43 | A |
| | | | | A = 0.999 | A = 0.999 | | | |
| 7158860 | 41181 | 99895331 | A/G | A = 0.001 | A = 0.001 | 0.943 | 0.22 | A |
| | | | | G = 0.999 | G = 0.999 | | | |
| 12437080 | 41414 | 99895564 | G/C | G = 0.883 | G = 0.817 | 0.0081 | 0.59 | G |
| | | | | C = 0.117 | C = 0.183 | | | |
| 11851768 | 41657 | 99895807 | G/A | G = 0.211 | G = 0.23 | 0.471 | 1.12 | A |
| | | | | A = 0.789 | A = 0.770 | | | |
| 12431943 | 42821 | 99896971 | G/A | G = 0.239 | G = 0.314 | 0.0245 | 1.46 | A |
| | | | | A = 0.761 | A = 0.686 | | | |
| 4309341 | 45475 | 99899625 | G/A | G = 0.999 | G = 0.999 | 0.924 | 0.59 | G |
| | | | | A = 0.001 | A = 0.001 | | | |
| 4329858 | 45611 | 99899761 | G/C | G = 0.999 | G = 0.999 | 1 | 1.00 | |
| | | | | C = 0.001 | C = 0.001 | | | |
| 10690268 | 45763 | 99899913 | AAA/— | AAA = 0.454 | AAA = | | | |
| | | | | — = 0.546 | — = | | | |
| 2401023 | 46038 | 99900188 | T/C | T = 0.731 | T = 0.773 | 0.178 | 1.25 | C |
| | | | | C = 0.269 | C = 0.227 | | | |
| 1054745 | 46344 | 99900494 | G/A | G = 0.188 | G = 0.27 | 0.00228 | 1.60 | A |
| | | | | A = 0.812 | A = 0.730 | | | |
| 8019453 | 46669 | 99900819 | T/C | T = 0.116 | T = 0.249 | 0.000607 | 2.52 | C |
| | | | | C = 0.884 | C = 0.751 | | | |
| 12431510 | 46926 | 99901076 | G/C | G = 0.999 | G = 0.999 | 0.98 | 1.17 | C |
| | | | | C = 0.001 | C = 0.001 | | | |
| 7141067 | 47069 | 99901219 | T/C | T = 0.001 | T = 0.002 | 0.97 | 1.45 | C |
| | | | | C = 0.999 | C = 0.998 | | | |
| 12431547 | 47293 | 99901443 | G/A | G = 0.192 | G = 0.294 | 0.000196 | 1.76 | A |
| | | | | A = 0.808 | A = 0.706 | | | |
| 7142316 | 47602 | 99901752 | G/A | G = 0.96 | G = 0.993 | 0.0544 | 5.62 | A |
| | | | | A = 0.040 | A = 0.007 | | | |
| 1959029 | 49821 | 99903971 | G/A | G = 0.898 | G = 0.842 | 0.01 | 0.60 | G |
| | | | | A = 0.102 | A = 0.158 | | | |
| 1959028 | 49875 | 99904025 | T/C | T = 0.941 | T = 0.873 | 0.000419 | 0.43 | T |
| | | | | C = 0.059 | C = 0.127 | | | |
| 11376292 | 51178 | 99905328 | —/A | — = 0.322 | — = 0.31 | 0.68 | 0.94 | — |
| | | | | A = 0.678 | A = 0.690 | | | |
| 11376755 | 51180 | 99905330 | A/— | A = 0.794 | A = 0.785 | 0.742 | 0.95 | A |
| | | | | — = 0.206 | — = 0.215 | | | |
| 7145420 | 51772 | 99905922 | A/G | A = 0.301 | A = 0.291 | 0.73 | 0.95 | A |
| | | | | G = 0.699 | G = 0.709 | | | |
| 8013347 | 51912 | 99906062 | G/T | G = 0.16 | G = 0.249 | 0.000671 | 1.75 | T |
| | | | | T = 0.840 | T = 0.751 | | | |
| 2144070 | 52252 | 99906402 | T/C | T = 0.774 | T = 0.735 | 0.224 | 0.81 | T |
| | | | | C = 0.226 | C = 0.265 | | | |
| 11850135 | 52294 | 99906444 | G/A | G = 1 | G = 1 | 0.965 | 1.64 | A |
| | | | | A = 0.000 | A = 0.000 | | | |
| 11850138 | 52317 | 99906467 | A/G | A = 0.002 | A = 0.002 | 0.985 | 0.90 | A |
| | | | | G = 0.998 | G = 0.998 | | | |
| 1955617 | 54548 | 99908698 | G/A | G = 0.534 | G = 0.521 | 0.736 | 0.95 | G |
| | | | | A = 0.466 | A = 0.479 | | | |
| 11621899 | 54889 | 99909039 | T/C | T = 0.004 | T = 0.009 | 0.774 | 2.36 | C |
| | | | | C = 0.996 | C = 0.991 | | | |
| 4900508 | 55377 | 99909527 | C/A | C = 0 | C = 0 | 1 | | |
| | | | | A = 1 | A = 1 | | | |
| 4906116 | 55498 | 99909648 | T/C | T = 0.038 | T = 0.027 | 0.619 | 0.70 | T |
| | | | | C = 0.962 | C = 0.973 | | | |
| 4906117 | 55622 | 99909772 | C/T | C = 0.327 | C = 0.276 | 0.0901 | 0.79 | C |
| | | | | T = 0.673 | T = 0.724 | | | |
| 2235972 | 55799 | 99909949 | C/T | C = 0.726 | C = 0.658 | 0.0193 | 0.73 | C |
| | | | | T = 0.274 | T = 0.342 | | | |
| 2235973 | 55995 | 99910145 | T/C | T = 0.163 | T = 0.235 | 0.0297 | 1.58 | C |
| | | | | C = 0.837 | C = 0.765 | | | |
| 2235974 | 56042 | 99910192 | C/A | C = 0.163 | C = 0.245 | 0.00633 | 1.66 | A |
| | | | | A = 0.837 | A = 0.755 | | | |
| 2235975 | 56342 | 99910492 | G/A | G = 0.948 | G = 0.967 | 0.184 | 1.61 | A |
| | | | | A = 0.052 | A = 0.033 | | | |
| 7149416 | 57781 | 99911931 | T/C | T = 0.662 | T = 0.717 | 0.178 | 1.29 | C |
| | | | | C = 0.338 | C = 0.283 | | | |
| 11850809 | 57983 | 99912133 | A/C | A = 0.002 | A = 0.002 | 0.956 | 0.74 | A |
| | | | | C = 0.998 | C = 0.998 | | | |
| 10140476 | 58906 | 99913056 | T/C | T = 0.93 | T = 0.908 | 0.298 | 0.75 | T |
| | | | | C = 0.070 | C = 0.092 | | | |
| 12437309 | 59257 | 99913407 | C/T | C = 1 | C = 1 | 0.954 | 3.60 | T |
| | | | | T = 0.000 | T = 0.000 | | | |
| 6575852 | 60926 | 99915076 | T/G | T = 0.998 | T = 0.999 | 0.875 | 2.34 | G |
| | | | | G = 0.002 | G = 0.001 | | | |
| 4906118 | 61462 | 99915612 | A/G | A = 0.892 | A = | | | |
| | | | | G = 0.108 | G = | | | |
| 11428825 | 62241 | 99916391 | —/T | — = 0.6 | — = 0.57 | 0.396 | 0.88 | — |
| | | | | T = 0.400 | T = 0.430 | | | |
| 11450744 | 62541 | 99916691 | —/T | — = 0.574 | — = 0.545 | 0.387 | 0.89 | — |
| | | | | T = 0.426 | T = 0.455 | | | |
| 1999612 | 63600 | 99917750 | T/C | T = 0.006 | T = 0.005 | 0.916 | 0.82 | T |
| | | | | C = 0.994 | C = 0.995 | | | |
| 1889368 | 63978 | 99918128 | G/A | G = 0.429 | G = 0.471 | 0.186 | 1.18 | A |
| | | | | A = 0.571 | A = 0.529 | | | |
| 1889367 | 63983 | 99918133 | G/C | G = 0.836 | G = 0.82 | 0.562 | 0.90 | G |
| | | | | C = 0.164 | C = 0.180 | | | |
| 1889366 | 63999 | 99918149 | G/A | G = 0.325 | G = 0.331 | 0.822 | 1.03 | A |
| | | | | A = 0.675 | A = 0.669 | | | |
| 3077388 | 64042 | 99918192 | —/CT | — = 0.607 | — = 0.563 | 0.183 | 0.84 | — |
| | | | | CT = 0.393 | CT = 0.437 | | | |
| 1889365 | 64276 | 99918426 | G/A | G = 0.721 | G = 0.742 | 0.461 | 1.12 | A |
| | | | | A = 0.279 | A = 0.258 | | | |
| 1955615 | 66308 | 99920458 | A/G | A = 0.636 | A = 0.615 | 0.5 | 0.91 | A |
| | | | | G = 0.364 | G = 0.385 | | | |
| 1569807 | 67400 | 99921550 | T/C | T = 0.694 | T = 0.687 | 0.812 | 0.97 | T |
| | | | | C = 0.306 | C = 0.313 | | | |
| 2064491 | 69255 | 99923405 | C/T | C = 0.406 | C = 0.373 | 0.298 | 0.87 | C |
| | | | | T = 0.594 | T = 0.627 | | | |
| 2064492 | 69263 | 99923413 | T/C | T = 0.343 | T = | | | |
| | | | | C = 0.657 | C = | | | |
| 761532 | 70965 | 99925115 | C/T | C = 0.73 | C = 0.792 | 0.0607 | 1.41 | T |
| | | | | T = 0.270 | T = 0.208 | | | |
| 1955616 | 71540 | 99925690 | A/G | A = 0.546 | A = 0.602 | 0.097 | 1.26 | G |
| | | | | G = 0.454 | G = 0.398 | | | |
| 2144065 | 74698 | 99928848 | G/A | G = 0.38 | G = 0.35 | 0.33 | 0.88 | G |
| | | | | A = 0.620 | A = 0.650 | | | |
| 2144066 | 74746 | 99928896 | C/T | C = 0.567 | C = 0.543 | 0.458 | 0.91 | C |
| | | | | T = 0.433 | T = 0.457 | | | |
| 2895908 | 75221 | 99929371 | A/G | A = 0.426 | A = 0.358 | 0.0304 | 0.75 | A |
| | | | | G = 0.574 | G = 0.642 | | | |
| 2401043 | 91289 | 99945439 | T/A | T = 0.001 | T = 0 | 0.948 | 0.00 | T |
| | | | | A = 0.999 | A = 1 | | | |
| 1007904 | 91796 | 99945946 | A/G | A = 0.514 | A = 0.526 | 0.732 | 1.05 | G |
| | | | | G = 0.486 | G = 0.474 | | | |
| 3891113 | 93762 | 99947912 | C/G | C = 0 | C = 0 | 1 | | |
| | | | | G = 1 | G = 1 | | | |
| 3891114 | 93780 | 99947930 | G/C | G = 1 | G = 1 | 0.976 | | C |
| | | | | C = 0.000 | C = 0 | | | |
| 730812 | 94242 | 99948392 | T/G | T = 0.903 | T = 0.888 | 0.57 | 0.86 | T |
| | | | | G = 0.097 | G = 0.112 | | | |
| 1884068 | 94809 | 99948959 | A/G | A = 0.558 | A = 0.548 | 0.748 | 0.96 | A |
| | | | | G = 0.442 | G = 0.452 | | | |
| 1884069 | 94816 | 99948966 | C/T | C = 0.288 | C = 0.256 | 0.274 | 0.85 | C |
| | | | | T = 0.712 | T = 0.744 | | | |

[0403] FIG. 1G shows proximal SNPs in and around the LOC145197 region for females. The position of each SNP on the chromosome is presented on the x-axis. The y-axis gives the negative logarithm (base 10) of the p-value comparing the estimated allele in the case group to that of the control group. The minor allele frequency of the control group for each SNP designated by an X or other symbol on the graphs in FIG. 1G can be determined by consulting Table 48. By proceeding down the Table from top to bottom and across the graphs from left to right the allele frequency associated with each symbol shown can be determined.

[0404] To aid the interpretation, multiple lines have been added to the graph. The broken horizontal lines are drawn at two common significance levels, 0.05 and 0.01. The vertical broken lines are drawn every 20 kb to assist in the interpretation of distances between SNPs. Two other lines are drawn to expose linear trends in the association of SNPs to the disease. The light gray line (or generally bottom-most curve) is a nonlinear smoother through the data points on the graph using a local polynomial regression method (W. S. Cleveland, E. Grosse and W. M. Shyu (1992) Local regression models. Chapter 8 of Statistical Models in S eds J. M. Chambers and T. J. Hastie, Wadsworth & Brooks/Cole.). The black line provides a local test for excess statistical significance to identify regions of association. This was created by use of a 10 kb sliding window with 1 kb step sizes. Within each window, a chi-square goodness of fit test was applied to compare the proportion of SNPs that were significant at a test wise level of 0.01, to the proportion that would be expected by chance alone (0.05 for the methods used here). Resulting p-values that were less than 10⁻⁸ were truncated at that value.

[0405] Finally, the gene or genes present in the loci region of the proximal SNPs as annotated by Locus Link (http address: www.ncbi.nlm.nih.gov/LocusLink/) are provided on the graph. The exons and introns of the genes in the covered region are plotted below each graph at the appropriate chromosomal positions. The gene boundary is indicated by the broken horizontal line. The exon positions are shown as thick, unbroken bars. An arrow is place at the 3′ end of each gene to show the direction of transcription.

[0406] Provided hereafter are ICAM, MAPK10, KIAA0861, NUMA1, GALE, DPF3 and LOC145197 genomic sequences (SEQ ID NO: 1, 2, 3, 4, 5, 6 and 7, respectively). Polymorphic variants are designated in IUPAC format. The following nucleotide representations are used throughout the specification and figures: “A” or “a” is adenosine, adenine, or adenylic acid; “C” or “c” is cytidine, cytosine, or cytidylic acid; “G” or “g” is guanosine, guanine, or guanylic acid; “T” or “t” is thymidine, thymine, or thymidylic acid; and “I” or “i” is inosine, hypoxanthine, or inosinic acid. SNPs are designated by the following convention: “R” represents A or G, “M” represents A or C; “W” represents A or T; “Y” represents C or T; “S” represents C or G; “K” represents G or T; “V” represents A, C or G; “H” represents A, C, or T; “D” represents A, G, or T; “B” represents C, G, or T; and “N” represents A, G, C, or T.

[0407] Following is an ICAM genomic nucleotide sequence that encodes ICAM1, ICAM4 and ICAM5 (SEQ ID NO: 1).

| >19:10219601-10312200 | |
|---|---|
| 1 | aggaggctga ggtgggagaa tggcgtgaac ctgggaggcg gagcttgcag tgagccaaga |
| 61 | tcacgccact gcactccagc ctgggcgaca gagcgagact ccgtctcaaa aaaaaaaaaa |
| 121 | aaaaaaaaaa agccaggcga ggtgactcac acccataatc gcagcacttt gggaggccaa |
| 181 | ggcgggcaga tcgcttgagc ccagaagttt gagatctgcc tgggcaacaY ggcgagaccc |
| 241 | tgtctctatg aaacaagaaa aaagaaagaa acgaaatact gttccatcat ttgccacata |
| 301 | aaatctaaac tctctggtgc agaacagact tgcaaatctg cctgtaaaat catacaccgg |
| 361 | attttggagt agacacacag gaggctgatt gtagtggtgg cttctgggag aagaactggg |
| 421 | gggtaggggg cacagataag agtagacaga attttcactc tagtaatctt tgtaattttt |
| 481 | gaaattctct ctaccaggtg tatgaatgac caatgaaaat atacaatagg ccaggcgcag |
| 541 | tggctcacgc ctataatccc agcactttgg gaggctgagg cgggtggatc acatgaggtc |
| 601 | aggagtccga ggccagcctg accaacatgg tgaaaccttg tctctacgaa aaatacaaac |
| 661 | attagtcagg tagggagcat cacttgagaa caggagttca agaccagcct ggacaacaaa |
| 721 | gcaagacctc tgcctctaca aaaaaaaaaa aaaaaaaaaa aaattgctgg gcatggtgga |
| 781 | acatgcctgt ggcctcagct acttaggtgg ctgcagcaga ggatcatctg aggccaggaa |
| 841 | ttcaagacta cagtgaacta taatcgttac actgcactac agactggtaa cagggtgaga |
| 901 | tcctgtctca aaaacaacag caacaaaata aacgattaaa agacctttta aagttgcaaa |
| 961 | atacatagag tcttaaacat gcatccacag ttatttattt atttatttag aaacggagtt |
| 1021 | tcactcttgt tgcccaggct ggagtgcaat ggtgcggtat cagctcactg caacctccgc |
| 1081 | ctcccaagtt aaaggaattc tgcctcagcc ttccaagtag ctggaattac aggcatgcgc |
| 1141 | caccatgctc ggctaatttt gtatttttag taaagatggg gttttggcat attggccagg |
| 1201 | atggtttcga acccctgacc tcaggtgatc cacccgcctc ggactcccaa agtgctagga |
| 1261 | ttataggcat gagccaccac gcccggccgc attcagttat tcttgcaggg ataaaataca |
| 1321 | caatgaaata cactatactt tttgttttct ttctttcttt tttttttttt tttttgagac |
| 1381 | agagtctcac tcgtcgcatg ggctggagtg cggtgcggga tctcggctca ctgcaacctc |
| 1441 | tgcctcctgg gttgaagcga ttctcctgcg tcagcctccc gagtagctgg gattacaggt |
| 1501 | gcccgccact acgcccagct aatttttttg tatttttagt agagataagg tttcaccatg |
| 1561 | ttggccaggc tggtctcgaa ctcctgactc gtgattcgcc caccttggcc tcccaaagtg |
| 1621 | ctgggattac aggcgtgagc caccgcaccc ggccacattt tttttttttt ttttttgaga |
| 1681 | caggatctta gtctgtcacc caggctggag tacagtggca tgaacatggc tcactgcagc |
| 1741 | ctcaatctct tgggttcagg tgatccttct gccttagcct ccccattagc tgggaccaca |
| 1801 | ggcatatacc atcacaccta gctaattttt aaatttttgg tagaggccag gcgcggtggc |
| 1861 | tcacgcctgt aatcccagca ctttgggagg ccgagtcggg tggatcacct gaggtcggga |
| 1921 | gttcgagacc agcctggcca aaatggtgaa accctgtctc tactaaaaat aaaaaataaa |
| 1981 | aataaaaatt agctgggcgt agtggcgggc gcctgtaatc ccagctactc gggaggctga |
| 2041 | ggcaggagaa tcgcttgaac ccaggaggca gaggttgcag tgagccaaga tcgcgctact |
| 2101 | gcactccagc ctgggcaaca gagtgagatt ctgtctcaaa aaaaaaataa taataatgct |
| 2161 | atttattgac tttacacctt gtaccaggca tgggaagctt tgcctccatt acgtcactga |
| 2221 | atctcataac ctccttttcc agcagaggaa aatgaggttg gttcacagac cacgttgtca |
| 2281 | gctgtgctct gtccagaacg cactggcctc caagtagaca gccctggact ggtagggaag |
| 2341 | ccggctatga tccggtggcg ccccctggag gtctatcggg aacatggtaa agaacctaaa |
| 2401 | aatgggtggg ccacagtagc tcatgcctgt aatcccagca ctttggggga ccaatgcggg |
| 2461 | agaattgctt gagcccagga gttcaagacc agcctgggca acattgggag acccaccccc |
| 2521 | cgccatctct acaaaaaaaa aattaggccg ggcgcggtgg ctcaggcctg taatcccagc |
| 2581 | actttgggag gccgaggcgg gtggatcacc tgaggtcagg agttcaagac cagcctggcc |
| 2641 | aacgtggtgc cacactgtct ctaataaaaa cacgaaaatt agggccgggc tcggtggctc |
| 2701 | acgcctgtaa tcccagcact ttgggaagcc gaggcgggcg gatcacgagg tcaggagatt |
| 2761 | gagaccatcc tggctaacac ggtgaaaccc cctctctact aaaaatacaa aaagttagcc |
| 2821 | aggtgtggtg gcgggcgcct gtagtcccag ctactcggta agctgaggca gggaatcgct |
| 2881 | tgaacccggg aggccgagat gtgcgatctc acaccactgc actccggcct gggcgacaga |
| 2941 | gcgatactcc atctcaaaat acaaatacaa aataaaaaaa tacaatacaa aaatgagccg |
| 3001 | ggcttgcgta cctgtagacc agctactcag gagacagagg caggagaatc ccttgagctc |
| 3061 | tggaggtcga ggctgcagta agccatgatc ttgcccattg cactccagcc tgggcgacag |
| 3121 | aggaagacct tgtctctaaa aaccaaaaca aagaaactaa aaataagcat tcggatttgt |
| 3181 | tagggggcga caagggaggc actccaggat ctgtggactc cccactttgt tctgtccttg |
| 3241 | gagagccctg gaaggtctga gaggggacgg gacctggttt aagggggtag gggagaggac |
| 3301 | cctggtctag ggggtaaggg acacaaatac ctaatctgag gggtttcggg gggacatggc |
| 3361 | cctgccctgg ggaatctaaa ctgggaggca tggtctggca ggcccaatcc tgaaggcttt |
| 3421 | ctgagggcaa taaggccctg cctttaaaca aatgaaaaaa cgccaggcac ggtggctcac |
| 3481 | gcctgtaatc ccagcacttt ggaaggctga ggcgggagga tcacgaggtc aggagatcga |
| 3541 | gaccatcctg gctaacgcgg tgatacccgt ctctactaaa aatacaaaaa attagccagg |
| 3601 | cgtggtggcg ggcgcctgca gtcccagcta ctcgggaggc tgaggcagga gaatggcgtg |
| 3661 | aacccaggag gcggagcttg cagtgagccg agatcgcgcc actgcactcc agcctgggca |
| 3721 | acagagcaag actccgtctc aaaaaaaaca aaaacaaaaa caaaaacaaa aacaaaaaaa |
| 3781 | caaataaaaa aacaaaacca cataactgga taaagaaaaa accatctccg acagccttgg |
| 3841 | aggcgggatg aaggcgtggc ccggtgggcg tgaccaacag caaaagttta agcgttattg |
| 3901 | gctgtattcc ttagttgctc actccagaac tgcccactta tgggcggggg tcactccttc |
| 3961 | aggcttaaca gtcattggct gaattgggcc agagaggtct cattggctga attcctgcac |
| 4021 | cggctcgtcg gaggcgggac ccaaagtagg ctaggcctac ggaagctggg tcttcttgct |
| 4081 | gtgaggtcgc gttccccagt gttacggagg gtccttgagg caggagtgaa aattgggtct |
| 4141 | gggggttagt cctggggtgg aggtctgggc acgccgggtc ggaccccctc catcttcggt |
| 4201 | tttgcacacc ccgctttcca gcgcggagtc gcggcgggta gggcggcgtc gcgtgcgtga |
| 4261 | cgtcatccag cggcgcctcg cRaggctcca gtggccttga cctcccgcgg cgtgggaggc |
| 4321 | tgcgcggcga tgctgcagtt cgtccgggcc ggggcgcggg cctggcttcg gcctaccggc |
| 4381 | agccaggtga ggccaggggc tggaggcgtg gtcgaaggat gaaatttggg ggtgtccagg |
| 4441 | ggtcgtctct cactttcgcc caacccttgc agggcctgag ttccctggcg gaagaggcag |
| 4501 | cgcgtgcgac cgagaacccg gagcaggtgg cgagcgaggg taaggcaacc ggggtggctc |
| 4561 | caggaggggc ggcgacagag aggtctgacc cttgacccta acctctgacc cccgcaatcg |
| 4621 | ctccaggtct cccggagccc gtgctgcgca aagtcgagct cccggtaccc actcatcgac |
| 4681 | gcccagtgca ggcctgggtc gagtccttgc ggggcttcga gcaggagcgc gtgggcctgg |
| 4741 | ccgacctgca ccccgatgtt ttcgccaccg cgcccaggtg agcgagggct gtaatggtga |
| 4801 | actgagtggc agagggatga agagcgggat ttcaggagtc acgatgactt tgggcttgta |
| 4861 | cccttgggaa agtgctgtat ttctacagcc tccgtttctc cacctgtcaa aggggaatga |
| 4921 | tgacagtttc ccctgctgta gcgctgtgtg agattgaagc ctgagaggtg acatcatcta |
| 4981 | agggttaggg agacagaatt ctggagcccg actgattagg ttcaaatcct gccttcccct |
| 5041 | cttgtccctc agtgtcccta ttttgtcagc ggtcgggagg ttgctgtgat gaataaatga |
| 5101 | cttaattctg gcacataata agttctatag aaatgttgat aatctttgtt aactggtttt |
| 5161 | tgcaaataag agcactaaaa agactaaacc attcctcggt gcctggaaga ggctgtttgc |
| 5221 | attttagtta ccctgctgtt cataacatct ctaagaaaat gtaggggcca ccctgggcgc |
| 5281 | agtggctcac gcctgtaatc ccagcacttt gggaggccaa ggcgggcgga tcacgaggtc |
| 5341 | aggagatcga gaccatcctg gctaacatgg tgaaaccccg tctctactaa aaatacaaaa |
| 5401 | aaaaattagc cgggcgtggt ggcgggcgtc tgtagtccca ggtactctgg aggctgaggc |
| 5461 | aagagaatgg cgtgaacccg ggaggcggag cttgcagtga gccgagatcg cgccactgca |
| 5521 | ctccatcctg ggcaacactc tgtctcaaaa aaaaaaaaaa aaaagaaaga aaagaaaatg |
| 5581 | taggggccag ttactgtggc tcacatctgt aatcccagca cattgggagg ccgaggtggg |
| 5641 | cggatcactt gaaaccagga gttgcagacc agcctggcca acatgatgaa accccgtctc |
| 5701 | taccaaaaat acaaaaatta gccggacgtc ttagtgcaag cctgtagtcc cagctactca |
| 5761 | ggaggctgag gcatgagaat cgcttgcacc tggggagatg gaggttgcag tgagccgtga |
| 5821 | ttatactact gcactccagc ctgggcgaca gagacagact ccatctcaaa aaaaaaaaca |
| 5881 | ggtgaaattg atttcaataa tgtatttaac ctgtatttaa aactatgtcg aaatcacatt |
| 5941 | gtagcatggg gcactggcca tgtttcagat gttgagtatg tgactgtatg gaatggtata |
| 6001 | gaactagaga ggaaaaccag tccctgaaga aggtggcaat aagtgaagtg taatagcagg |
| 6061 | aaaaaagtaa tggtaggaaa aacaaggaag aaggggtggc tttttttttc tgagatgaag |
| 6121 | tttcgctctt gtcgcccagg ctggagtgca atggcatgct ctcagctcac ttcaacctcc |
| 6181 | gcctcctggg ttctactaat tctcatgcct cagcctcccg agtagccaga atgacagaca |
| 6241 | tgtaccaccg tgcccagcta atctttgtat attttggaga gacatcactt tgccatgttg |
| 6301 | cccaggctgg tcttactcct tgcctcaagt gatccacctg ccttggcctc ccaaagtgcc |
| 6361 | aggattccag gcatgagcca ctgcacctgg tcagggtggc tctttcttta gaaggtacct |
| 6421 | ttcagcagtt attggagctg ctacctgtag gctgagaaag aaccatccag gagaagagtg |
| 6481 | tttcaggcag agggaacagc aagtgccaag gccctgaggc agaatttcaa gatggggtca |
| 6541 | gtgaggggca gaggcaaatc gcccagggcc ctggaggcag aagggagaat cctgggtttt |
| 6601 | cctatagtgg ggtgggagcg tttgaagcag agttgggctt ctcatgtgtc cttcctcccc |
| 6661 | gcaggctgga catactgcac caggttgcta tgtggcagaa gaacttcaag agaattgtga |
| 6721 | gtgcctaaat ggagcaaggt ggtgggaagg agcttcctgg ggaggttggg gataggaccc |
| 6781 | agaggaagcc catcgctggg ttttctctgg actgctcggc tggggcctca tctgtctcct |
| 6841 | gaactattca ccgatgggtc catttttggt tctctttttt ttgtttgttt ttgagatgga |
| 6901 | gatggagtct cactctgtca cccaggctgg agtgcagtgg cgcaatcttg gttcactgca |
| 6961 | acctccgctt cctgggttca agcgattctc ctgcctctgc ctcctgagta gctgggatta |
| 7021 | caggtgtgca ccaccatgca ggctaatttt tgtattttta gtagagatgg agtttcacca |
| 7081 | tgttggtcag gctggtctca aactcctgac ctcaaggaac ctacctgcct tggcctccca |
| 7141 | aagtgctggg attacaggcg tgagccaccg tgcccagctc attttcagtt gttttctgat |
| 7201 | cactcactga tgtgggcatt gtggtgggtg agaggatata gcagggacca cgaggacaaa |
| 7261 | acaggcaagg tccggctgtg tgcaagtggc tcaggcctgt aatcccagca ctggaagctg |
| 7321 | aggtgggtgg gttgcttggg gccaggaaag accagcctgg gaaacagcaa gacccagtct |
| 7381 | ctaccccttc ccccacaacc ccaagaaaaa gatgggcaaa gtccctattc taatgaaggt |
| 7441 | cacagtgtca tgggaggaga agtgaaggtg agtcagatgg tcatacgtaa tgtgtaatta |
| 7501 | tgagcatgtc ccagagaatg ggacgttcaa ccttgggtct actgtagaag ctaaccagat |
| 7561 | caaggaggca gtggggctag tgtggagata acaggaacag ggtgtgcaaa ggccctgtgg |
| 7621 | cagggaccac aaggaagcca gtgttgccac agaggccagt gggagcagtg gggaggagtc |
| 7681 | tgggttttgt gccaagaaca ttgaagaatc cattaccagt cagggtctta tccatccacc |
| 7741 | ccagaggtct ggccagtcct ccccctgctc acaccttccc tggctcccca tcaccctagg |
| 7801 | aataaagtca tcagtctgct attctgagtt cttcctgatt tccttgccct gctcctcttt |
| 7861 | cctgattctc cctgtctgtg tcatttccca tggccctccc tccttgtggc tacaaccaca |
| 7921 | ttaaaattgt tcaaaaaata ggccggcacg gtggctcaca cctgtaatct cagcactttg |
| 7981 | ggaggccaag gcaggtggat cacttgaggc caggagttcc aaaccagcct agtcaacgtg |
| 8041 | gcaaaacccc atctctactg aaaatacaaa aaattagctg gggccaggtg cggtggctca |
| 8101 | cacctgtaat cccagtactt tgggaggccg aggcggatgg atcacgaggt cgggagatcg |
| 8161 | agaccagcct gaccaatatg gtgaaacccc atctctacta aaaatacaaa tattagttgg |
| 8221 | gtgtggcagc gggcgcctgt agtcccagct actctggagg ctgagacagg agaattgctt |
| 8281 | gaacctggga ggcggaggtt gcagtgagcc gagatcgcgc cactgcactc cagcgtgggc |
| 8341 | gacagagcga gactccatct caaaaaaaaa aattagccgg gcatggtgac aggcacccgt |
| 8401 | aatctcagct actagggagg ctgaggcagg agaatcgctt gaatctagga atcagaggtt |
| 8461 | gcagtgagcc aaggtcacac cacttgcact ccacagcctg ggtgacagag tgagactgcc |
| 8521 | tcaaaaaaaa aaatcaatag ttcagaaaat accgagcacc ccctgcgtgc ccggtggcag |
| 8581 | ggcccctgcc tttgtgaggc tggcatgggg caggagctgt gacttcttta ccctccccct |
| 8641 | cgctccccaa gtactctgtg cttggccaga gagagcccgt catcatggtg cctcctgtct |
| 8701 | gacttccccg tggcaggact gatctgcccg gctccctgac acctgcctcg tggacctgac |
| 8761 | ccccctcctc tttgtgcctc cagagctatg ccaagaccaa gacgagagcc gaggtgcggg |
| 8821 | gcggtggccg gaagccttgg ccgcagaaag gcactgggcg ggcccggcat ggcagcatcc |
| 8881 | gctctccgct ctggcgagga ggtaacagga cagggtggag ggggcgggga ggggtggggg |
| 8941 | ggccagggaa gggcctgggt gtttactcac acacagctgc gcacatctgg catggtatta |
| 9001 | tgtcagccct gttccctcca cctcatggaa ccacctgggc tggtgacatc ggaactgagg |
| 9061 | cccttggacc tcactaccca tataagggga cagagatctg ggagccatcc actcctccct |
| 9121 | ctcgcatgcc ctgtctcttc agcctgtggc cacagcccct cttgacccca cctcctgtca |
| 9181 | ccctctcctg acccacactt cccacagcac ccagagagct cttctaaatc gtggaacctg |
| 9241 | aactccggac ctcggccttt gtgtggaacc tgaactcctg accttgtcat tgtgggccct |
| 9301 | ggtggctgca cacctttccc cctcatcccc tcctttccct ctctgaccag gcagagatga |
| 9361 | ctctctcttg ttttttcggt tgtgtttgtt tttaactttt tattttcttg aatgctaaca |
| 9421 | agatgactca gggtggtgcc agccacccca tcacctgttt acctggccag ctctcctcac |
| 9481 | ctttcagggt tctgggccac acctcctcca ggaagccccc cttgatctcc tttccttcca |
| 9541 | catcccccgg agctaccctg atttcttcta cagctgagcc tcttttctgc cctgccggaa |
| 9601 | tgtgaatggc atgagggcag ggaccatgtc tgttgtcttc tctgctgcat ttccaaggcc |
| 9661 | caggcgaggg cagacaccaa cacatggtgc ttgcaggggt ctccctgact gttgttgctc |
| 9721 | ccagatcata ctgcttgctc caccggagca tgtgcctgat gccttcctct cccgcttgac |
| 9781 | ctgaaagttc gaacctcctg ataacttcag cattaacagc gtgcttgagt taagttcaca |
| 9841 | ctctagccac tctatggaat ccacaccata actcatggtg tcctatgggg caggaactgt |
| 9901 | ccgatctcaa ggtggtttgt tttttttatt gtttgctttt gagacaagat ctcgctctgt |
| 9961 | tgcccaggct gtagtgcagt ggtgcaatca tagctcactg cagccttgag ctcctgggct |
| 10021 | caagtgatcc tccatcctca gcctcccaaa atgctggtgt gagccacctt cgccagccct |
| 10081 | gtctcagagt gtgacagctg ggaaaactga agcccagtga agcaaagtca ctggtcccat |
| 10141 | gttgtccctg atccagcctc ccctgaggcc ccaccctctc tgccttgttc ctggcagcgc |
| 10201 | cccctctctc gtcaccccat gccagccact gcagcagatt gctgacctcc aggctctgca |
| 10261 | gtggccccta cctgctcaca tgcctctgtc cccgcaggag gtgttgccca tggcccccgg |
| 10321 | ggccccacaa gttactacta catgctgccc atgaaggtgc gggcgctggg tctcaaagtg |
| 10381 | gcactgaccg tcaagctggc ccaggtacag ccatgggggg gcccagacag ctgctagagg |
| 10441 | tggggctgct ctggacccag ggttcaaacc atcctttcct tccaccagga cgacctgcac |
| 10501 | atcatggact ccctagagct gcccaccgga gacccacagt acctgacaga gctggcgcac |
| 10561 | taccgccgct ggggggactc cgtactcctc gtggacttgt gagggcacag ggcagagcag |
| 10621 | gggcaggggg ccctgagctc cgtactctga gggttcaacc cccactccct ggcctctctt |
| 10681 | acagaacaca cgaggagatg ccacagagca tcgtggaggc cacctctagg cttaagacct |
| 10741 | tcaacttgat cccggctgtt ggtgagcaaa gagcccaggc ccctagagtg cgcatgtgca |
| 10801 | ggctccgctg ttagaatcac agcggttcaa atccggcatc tggtcgctga gtggcctcag |
| 10861 | gcagtgacca cgctcccgga cccaaccttc agcttgccca aagcaataat ctttcctaaa |
| 10921 | gaagtgcttg gctggggatg gtggctcacg cttgtaatcc cagtactttg ggaggccaag |
| 10981 | gcagtctggg caatatagtg aggctcccat ctgtactaaa aataaaaaag ttaggcgtgg |
| 11041 | cgatgtgcac ctgtagtccc agctactcgg gggctgagcc aggcggatag cttgagctca |
| 11101 | gggggccaag gctgcagtga gtcatgatcg caccactgca cccaaacctg gggagagagc |
| 11161 | tagactcttg tctcaaaaaa aaaaaaaaaa aaaaaaaaaa agctccaaag tcacctctgt |
| 11221 | caaagccaca gtctgttcct tccacagcca caagatggcg acatgagcct aagtcaagtc |
| 11281 | ctgtccctca acccacgccc ctcgctggct tccccacctc tctcaggatg aaagcccaag |
| 11341 | tcatcagggt ggcacgtcag gccctgcacg atgtgccccg tcacctccct gccctcccgt |
| 11401 | catttgccct gggtctcccc caccagaatg ggagccagga gtcccagcca ggcacaggac |
| 11461 | cgagcctggc tctcggtcag caggtgatga gctgggagca gctccttggc cagaggctta |
| 11521 | caggcaacaa gcggccaggc agggtctggc cccgggctgc tgggctcaca aagtcacact |
| 11581 | agaccacagt gacgatctct gtaagcacaa agggactccg atgtgggtgg ggtgaggaga |
| 11641 | gaggcagccc cggcctgacc ggccccccgc cccgccccca ccccgccccc aggcctaaat |
| 11701 | gtgcacagca tgctcaagca ccagacgctg gtcctgacgc tgcccaccgt cgccttcctg |
| 11761 | gaggacaagc tgctctggca ggactcacgt tacagacccc tctacccctt cagcctgccc |
| 11821 | tacagcgact tcccccgacc cctMccccac gctacccagg gcccagcggc caccccgtac |
| 11881 | cactgttgaW gtgaagcacc tcttYtgagc caggccgagc ccctggccga cttgggagcc |
| 11941 | tYaggcccac gcccaccctt cgaggaaggt gtcacctgga ccccttcatt ccacggagga |
| 12001 | agctgaggcc acagggagcg gccatcgcca ttgggaaggg gcgactccac ggaRagccca |
| 12061 | gacgggcttY tgcatccatt ccctcttttt gtttttaaaa taaattgtat ttttgaatca |
| 12121 | aggaggataa agataacttc tcagtgtcat ttttgataat tgcattgaga acgatgagct |
| 12181 | ccttcccagg ttctgggcac tgttggggat ccgccgtctc aagaggctca cggtctggtt |
| 12241 | taggggaacc ccagggctgt ttgtggaaat tacaagaatt cacttacccg gtgagtcaga |
| 12301 | ctccaggagc tcacaggtgc gtgggcgctg gcacttccta ggagctgact cctgccacat |
| 12361 | ccctctcctg agcactgctg ccagccattc tcacccctga gagggtttgc agtcctgtct |
| 12421 | gcgacagtac ttcatgcagc ctgagagtgt gtgcttgatt gtacaagtag atgttgtgta |
| 12481 | aacctgagtt ttcagagtga cttcctgtaa gcacagtcag aaaagtaaat gtctctctgt |
| 12541 | aagtgagcag ataagcacat gcttaaaaac accagctggg cgtggtgact cgcacctgta |
| 12601 | accctagcac tttgggaggt caaggtggaa ggatcgtttg agctcagagc ttccagacca |
| 12661 | gcctgggcaa catggtgaaa ccccatctct gcaaaaaata taaaaattaa gtgggcgtgt |
| 12721 | tggcgtccac ctgtggtccc agctacttgg gaggctgagg tgggaggatc acctgagccc |
| 12781 | aggaagcaga ggttgcagtg agctgagact gagccaccac acaccagcct gggtgacaga |
| 12841 | gtgagacact gtcttaaaac cccaatatcc caatttttga gtttgctgag gttgccagcc |
| 12901 | aagttaattt ttcttaacag ccataacaga ctataatata gacaatgtga tcgatttatt |
| 12961 | taaagtcaac cagctgggcg cggtggctca cgcctataat cccagaattt taggaggctg |
| 13021 | agccaggtgg atcaccggaa gtcaggagtt cgagaccagc ctggccaagc cgggagtggt |
| 13081 | ggcgggcacc tgtaatccca gctacttagg aggctgaggt gggagaatcg cttgaaccca |
| 13141 | ggaggcagag gttgcagtga gccaagatag cgccactgcg ctccagcctg ggtgacagag |
| 13201 | caagattcca tctataaata aataaataaa taaagtcaat caggactgcc ttctgcctgt |
| 13261 | gtgggcctgg ccaggctaag cagccacaca accctcccta cctgctgggc cacccctggc |
| 13321 | tgaaaacctc tctggaatgc ctctcttggg attgccttca gagattgcaa cacattctcc |
| 13381 | aaacaccctc agtggacata gactttgatc cttgaagcag cagatttgac taagtaaaaa |
| 13441 | agaaaaagct attaaaacca gttggctggg cgcggtggct cacgcctgta atcccagcac |
| 13501 | tttgggaggc cgaggcaggc ggatcacgag gtcaggagat cgagactatc ctggctaaca |
| 13561 | cagtgaaacc ccatctctac caaaaataca aaaaattagc cgggcgtggt ggtgggcgcc |
| 13621 | tgtagtccca gctactcagg agactgaggc aggagaatgg tgtgaacccg ggaggtggag |
| 13681 | cttgcagtga gccgagatcg cgccactgca ctccactcca gcctggcgac agagctagac |
| 13741 | tgtctcaaaa aaaaaaacag aggcgtgcca aagctcagca gaaaatgccg cctcatcact |
| 13801 | cttcctcttg ccagtcttgt gggggcacca aggcctagag taacacccag ctgttggcct |
| 13861 | gacagtgcct ggcccagcct ggagagttgc agccagaagt ataaatgtgg ttcagtctgc |
| 13921 | gtcatacctg tcaggaaaca tggtgagacc aactgctgcc cagacggatt ttcaaaagaa |
| 13981 | atgggtcaga acgtattccc ccacactgga atccctcagc cagattgagg ataaaaacag |
| 14041 | gcatcagaaa aaaatgatac aggcaggcct ggtggctcat gcctgtaatc ccagcacttt |
| 14101 | gggaggctga ggcgggagga tcgcctgagc acaggagttt gagaccagcc tgggcaacac |
| 14161 | agtgagaacc tatctctact aaaaatagaa caattagcca ggcacggtgg tgtggctgtg |
| 14221 | gtcccagcta ctctggaggc tgaggtggga ggatcacttg agccctaggg gtagaggctg |
| 14281 | cagtgagcgg agatcacccc actgcaatcc agcctgggca acagatcaag accctgtctc |
| 14341 | aaaaaaaaaa aaaagaaaag aaaacaaaag aaaaatatga tacactgact agaatgtgct |
| 14401 | ttaaaataat tggcatagtt gggtatggtg gcatgcacct gcagtctcac ctacttggaa |
| 14461 | agctgtggcc aggagtttga gaccagcctg ggcaacacag caagacctca tctctataaa |
| 14521 | aaataggcgg ggagcagtgg ctcacgcctg taatcccagc actttgggag gccaaggcag |
| 14581 | gcggatcact agaggacagg agttcaagac cagcctggcc aacatggtga aaccccatct |
| 14641 | ctactaaaaa tacaaaaatt ggcaggatgt ggtggcgggt gcctataatc ccagctactt |
| 14701 | gggaggctga ggcaggagaa tcgcttgaac ctgggaggca gaggttgcag tgagccgagg |
| 14761 | tcatgacact gccctcaaac ctgggtgaca gagcaagact cggtctcgaa aaaaaaaata |
| 14821 | atgaatgaat gaattaattc attaattaaa tagggggggt atatgagttt gttagggctg |
| 14881 | ccgtaggagt gccacaaact gcaggggttg ggggggttag tcaacagaaa tttattctgt |
| 14941 | cctgtttctg gaggctggaa gtccaaggtg aagaacaggg ttagctcctt ctaagggaaa |
| 15001 | atctgttcca gatccctctc ctagcgtctg gtggtttgct ttgctgacta tctttgacat |
| 15061 | tccttggctt gtagccacac tgcttcagtc tccaccttca tctttacatg atgttgtccc |
| 15121 | tgtgggtatg tgtctgtttc tgtgtctaaa tttctccttt ttattttttt cttttttctc |
| 15181 | tatctttttt tttagacgga gtcgcgctct gttgcccagg ctggagtgca gtggctcgat |
| 15241 | ctcggctcac tgcaacttct gcctcctggg ttcaagcgat tctcctgcct cagcctccca |
| 15301 | agtagctggg attacaggcg cccaccacca tgcctggcta atttttgtgt ttttagtaga |
| 15361 | gaaggggttt cgccatattg gccaggctgg taacctcagg tgatccaccc gctttggcct |
| 15421 | cccaaagtac tgggattaca agcgtgagcc accgaacctg gcctattttt tcatttattt |
| 15481 | ttagacagag ttttgctctt cttgtccagg ctagagtaca atggcgcaat ctcggctaat |
| 15541 | ctcaacctcc gcctcccggg ttcaggcgat tctcctgcct cagcctccca agtagctggg |
| 15601 | attacaggca tacgccacaa tgcctggcta attctgtttt gttagcagag atggggtttc |
| 15661 | accatgttgg tcaggctggt ctcgaactcc cgacctcagg tgatccaccc acctcagcct |
| 15721 | cccaaagtgc tgagattaca gacacgagcc actgagcctg gccctctcct ttttattttt |
| 15781 | aaaatatatt ttgtggacgg cagcagtggc tcacacctgt aatcccagca ctttgggagg |
| 15841 | ccgaggcggg tggatcacaa ggtcaggaac tcgagaccag cctggccaat atggtgaagc |
| 15901 | cccatctcta ctaaaaatat aaaaattagc caggcatggc cgggcgcggt ggctcacgcc |
| 15961 | tgtaatccca gcactttggg aggccgaggc gggcggatca cgaggtcagg agatcgagac |
| 16021 | catcctggtt aatacggtga aaccccgtct ctactaaaaa tacaaaaaaa aaattagctg |
| 16081 | ggcgaggtgg caggtgcctg tagtcccagc tactcgggag gctgaggcat gagaatggcg |
| 16141 | tgaacccggg aggcggagct tgcagtgagc tgagatcgcg ccactgcact ccagcctggg |
| 16201 | tgacagagtg agactccatc tcaaaaaaaa aaaaaaaaaa tttagccagg cgtggtgtca |
| 16261 | gaagcctgta gtcgcaacta cttgggaggc tgaggcagga gaatcacttg aacccaggag |
| 16321 | gtggaggttg cagtgagccg agaccacatc acggcacatc taaaaaaaaa aaaagttttc |
| 16381 | tgtttttgtt ttttgcaaaa ctactgaaat aaatacagtg agatatttat ttataaatga |
| 16441 | gaacgaatta ataatgagcc gtaggctggg tgtggtggct catgcctata atcccagcat |
| 16501 | tttggggggc caaggcaggt ggaacacttg aggtcaagag ttcgagacca ggctgaccaa |
| 16561 | tatagtggaa ccccatctct actaaaaata caaaagaatt agccgggcat ggtgccgggc |
| 16621 | gcctgtaatc tcagctatgg gaggctgagg taggagaatc gcttaaaccc tggaggcgga |
| 16681 | ggttgcagtg aggcgatatc acgccactgc actccagcct gggggacaga gcgagactcc |
| 16741 | atctctaaat aaataaataa ggagctgtat ttcaaaattt ggagaaggtg acactgagag |
| 16801 | tactgaatac acagtttttt gtttttttgg ttttttttga gacagagtct cgctctgtca |
| 16861 | cccaggctgg agtgcagtgg tgcaacctcg gctcactgca atctctgcct cccggttcaa |
| 16921 | gcaaatctcc tgcctcagcc tcccgcgtag ctgggattac aggcacgcat ccccatgcct |
| 16981 | ggctaatttt tgtattttta gtagagacgg gatttcacca tattggtcag gctgatctca |
| 17041 | aactcctgac ctcgtgatct gcctgcctcg gcctcccaaa gtgctgggat tacaggcgtg |
| 17101 | agccaccgag cctggcccca aaaaatattt atcaaaacta tgttaatgct ggccgggtgc |
| 17161 | ggtggctcat gcctgtaatc ccagcacttt gggaggccga ggcaggtgga acacgaggtc |
| 17221 | aggagattga gaccatcctg gctaacacgg tgaaaccccg tctctactaa aaaatacaaa |
| 17281 | aaattagccg ggcgcggtgg tgggtgcctg tagtcccagc tactcaggag gctgaagcag |
| 17341 | gagaatggca ggaaccgggg aggcagaggt tgtagtgagc tgagatcgcg ccattgcact |
| 17401 | ccagcctggg cgacagagcg agaatccgtc tcgaaaaaaa aaaaaaaata cacacacaca |
| 17461 | cacaaaaact gtgttaatgc ttaactacac aaaaatgata atcagataaa tatgcattta |
| 17521 | tttagagaac tgcatgttgg tcagtccagt ccctgcagag ggaattccca gcatgacctc |
| 17581 | attcacttgt gaagacagag caatccttgt gttttatttt tttaagatgg atctcactct |
| 17641 | gttgcccaga ctggagtgca gtggcatgat ctcagccctc tgccacctcc accttccggg |
| 17701 | ttcaagagat tctcatgcct cagcctcctg agtagctgag attacaggct tgtgcctcca |
| 17761 | tgcccagcta atttttttat ttttactaga gatgaggttt caccagtttg ggcaggccgg |
| 17821 | tctcaaactc ctgacctcaa gtgatccacc cacctcggcc tcccgaagtg ctgggatgac |
| 17881 | aggtgcctgg tcagcaactg ttgtttagac atacacattt tatctgctcg tccagcatgg |
| 17941 | tcagccctcc actttttaaa ttttatttta tttatttttt tgagacagag tctcactctg |
| 18001 | ttgtccaggt tggagtccag tggcgtgatt tcggctcact gcaacctcta cttcccaggt |
| 18061 | tcgagcaatt ctcctgcctc agcttcccga gtagctggga ttacaggccc gcgtccccac |
| 18121 | acctagctaa tttttgtatt tttagtagag acagggtttc accatgttgg ccaggctggt |
| 18181 | ctcgaactcc tgacctcagg tgattctcct gccttggcct cccaaagtgc tgagattaca |
| 18241 | ggtgtgagcc actgcacacg gccttaaatt ttatttatta tttatttatt tatttattta |
| 18301 | gagacttagt ctcactctgt tgcccaggct ggagtgcagt ggcatggtct cggctcactg |
| 18361 | cactccacct cctgggttca cgccattctc ctgcctcagc ctcccgagta gctgggacta |
| 18421 | caggcgccca ccaccactcc cggctaattt ttgtattttt agtagagatg gggtttcact |
| 18481 | gtgttagcca ggatagtctc gatctcctga cctcgtgatc cgcctgcctc ggcctcccaa |
| 18541 | agtgctggga ttacttattt tgttttttgt agagacaggt tctcactgtg ttgcccaggc |
| 18601 | tggtcttgaa ctcctgatct caagtgatct tcccacctca gtctctcaaa gggctgggat |
| 18661 | tacaggggtg agccactgca ccccaccttc cctctacttt ttgacggttt ccttctgcta |
| 18721 | tgaatgtgca tgtccagttg tctgcttctt agaactgata tttaccttcc tcatccatca |
| 18781 | gccattggag gaggactggg accgctcaga ttattgatct gacccattct ttcggcaggg |
| 18841 | tttcctggtg gctgtcttcc atcaccaaaa ctggaatcag aagagtttcc atagcccttt |
| 18901 | ttttttcccc acatctttgc tgaagcagag ttttgaaaaa caaaaccaca aactaagcta |
| 18961 | ttccccagaa gaaatctgta atcaaagata agctctgccg ggcacagtgg ctcacgcctt |
| 19021 | ttggaggcca aggcgggcgg atcacctgag gtcaggagtt ctagacctgc caggccaaca |
| 19081 | tggtaaaacc tcatctctac taaaaataca aaaattagct agatgtggtg gtgggtacct |
| 19141 | gtagtctcag ctacctggga ggctgaggca agagaatcgc ttgaacctgg gaagtagagg |
| 19201 | ttgcagtgag ccgagattgc accactgcac tccagcctgg gcgacggagt gagacgacct |
| 19261 | cacaaaaatt tacataaata aaatgaaaag taaaataaaa atacaaaagt tggccgggtg |
| 19321 | cgtttgctca cgcctgtaat cccagcactt tgggagggtg aggcaggcag ataatgaggt |
| 19381 | aagaagatcg agaccatcct ggctaacacg gtgaaaccct gtctctacta aaaatacaaa |
| 19441 | aaattagctg tgcgtggtga cacgcacctg tagtcccagc tatttgggag gctgaggcag |
| 19501 | gagaatcact tgaacctggg aggtggaggt tgcagtgagc cgagatcgca ccactgcact |
| 19561 | ccagcctggg ccacagagtg agactccatc ttgaaaaaaa aaaaaaatac aaaagttagc |
| 19621 | caggggtgtt ggtgggtgcc tgtaatccca gctatttggg aggctaaggc agaagaattt |
| 19681 | cttgaaccta ggaaacggag gttgcagtga gccgagatca cacctctgta ctccagcctg |
| 19741 | gacaacagag cgagactttg tctcaaaaaa aaaaaaaaaa aaaaaactaa ataggccggg |
| 19801 | agcagtggct catgcctata atcccagccc tttgggaggc caaggcaggt ggatcacttg |
| 19861 | aggtcaggag tttgagacca ggctggccaa catggtgtaa ccccgtctct actaaaaaca |
| 19921 | caaaaattag ccgggtctgg tggcgtatgt ctgtaatccc agctactcgg gaggctgagg |
| 19981 | caggagaatc acttaaacct gggaggcagg ggttgcagtg agctgagatc gtgccactgc |
| 20041 | actctagcca gggtgacaga gtgaaactct gtctcaaaaa attaaaaaag aaattcagca |
| 20101 | agtaatgagt taaggaattc gaatattaag gcgagtgaca aggaacgccc aggatgtggc |
| 20161 | ccaggatgga gtagggggga cactcattta ggagaaagct caggccacaa gacaggagga |
| 20221 | gccagccttg ttggggttga agggaagagc attccaggct gagggaactg caaggcgttt |
| 20281 | gcatgggaca ctatgggatg gcttctgccc ttggtgggca gcctctggtc tgaggccatt |
| 20341 | ctttggcctg cctgactgtc tggcaaccgg gaggaagccc tgcccttcct ggagacagaa |
| 20401 | acaaaggtct aggaaatatc tgcttccctt ttccttgaaa aacgcttaag ggaacggagg |
| 20461 | actgggaggt gccgtctctc tctgccagcc tgccccctac catagccatc ccactcccat |
| 20521 | ctcagaaagt gacccgccat cctccaaaag gctcggaccc tgatcaagga gtcatccccc |
| 20581 | ttgtcccagc acctccagtt ggcccagcct ccaaaacgga tgtcaaattc agccctttct |
| 20641 | ccaaggacac tgcccagtcc aggccccact atcattcatc tggactagaa cagtcacctc |
| 20701 | ctctcccatc tcctggctgc agctcttgaa gcctcaactg ggcccctgtg aacacttgag |
| 20761 | ttagggcaag gtccttcctc tgctcagaac cctctatacc tcccacctcg ctgggcataa |
| 20821 | aagccaaagt cctggccagg cacggtggct cacatctgtt atcccagcac tttgggaggc |
| 20881 | caaggggggc ggatcactag aggtcaggag ttagagacca acatggtgaa accccatctc |
| 20941 | tactaaaaat acaaaaatta gctaggcgtg gtgacgcacc cctgtagtac cagctactcg |
| 21001 | gtaggctgag gtgggagaat cgcttgaacc tgggaggcag agtttgcagt gagccgagat |
| 21061 | cacaccactg tgctccagcc tgggtgacag aacgagactg gggttcagaa acaaacaaac |
| 21121 | aaaacaacaa agtcctcctc aggtgacagg aacttgcacc tatctgccct gtcatctccc |
| 21181 | tgcccgctcc tctcctcgaa tctctccttt gctaagcctg ctccagccac actgttctcc |
| 21241 | tggctgttcc tttttttttt tttttttttt tttttttgag tctcactctc acccaggctg |
| 21301 | gagtgcagtg cctctatctt ggctcactgc aacctccgcc tgccgggttc aagagattct |
| 21361 | cctgcatcag cctcccaagt aggtggaatt acaggtgtgc accaccacac ccggctaatt |
| 21421 | tttgtatttt gcatagagat gggggtctcc ctatgttgcc caggctggtc ttgaactcct |
| 21481 | gggctcaagt gatcctScca tctcggcctc ccaaaatgct gggattacag gtgggaRccg |
| 21541 | cgcccaggtg gatttttgtc tgactctgtt cattcctgtg tccccagtac ctggaaggac |
| 21601 | gccaagcaca cagtaggcgc ttaaaaaaca ttgagccaca tgttgagaaa agaacggcac |
| 21661 | cattgtggct gcaagtggga cKtgggccgc gcgggggagc tcgcgcacct cgggccgggg |
| 21721 | caagagctca gtggaacccg cccgaggaag aacccgtggc gcaggatttt cccaggcctt |
| 21781 | ctgaggacca ggggcgtccc ccgtcccacc ctgtgacttt gctcaggccg ttccggggcg |
| 21841 | ggaattcaga actcctcagc cccccaagaa aaaaatatcc ccgtggaaat tccttgggaa |
| 21901 | tgaccgaggc gggggaaata tgcgtctctg gatggccagt gactcgcagc ccccttcccc |
| 21961 | gataggaagg gcctgcgcgt ccggggaccc ttcgcttccc cttctgctgc gcgacctccc |
| 22021 | tggcccctcg gagatctcca tggcgacgcc gcgcgcgccc cacaacagga aaRccttagg |
| 22081 | cggcgcggct tggtgctcgg agacttaaga gtacccagcc tcgacgtggt ggatgtcgag |
| 22141 | tcttggggtc acacgcacag gcggtggcca agcaaacacc cgctcatatt tagtgcatga |
| 22201 | gcctgggttc gagttgccgg agcctcgcgc gtagggcagg ggttcgagcg ccccttctcc |
| 22261 | ctgcctcgcc tctgcgcctg ggggctgctg cctcagtttc ccagcgacag gcagggattt |
| 22321 | cgagcgtccc cctcccctcc ctcgtcaaga tccaagctag ctgcctcagt ttccccgcgg |
| 22381 | agcctgggac gcNNgcggag gggctcggcg cgtagggatc acgcagcttc cttccttttt |
| 22441 | ctgggagctg taaagacgcc tccgcggcca aggccgaaag gggaagcgag gaggccgccg |
| 22501 | gggtgagtgc cctcgggtgt agagagagga cgccgatttc cccggacgtg gtgagaccgc |
| 22561 | gcttcgtcac tcccacggtt agcggtcgcc gggaggtgcc tggctctgct ctggccgctt |
| 22621 | ctcgagaaat gcccgtgtca gctaggtgtg gacgtgacct agggggaggg gcatccctca |
| 22681 | gtggagggag cccggggagg attcctgggc ccccacccag gcagggggct catccactcg |
| 22741 | attaaagagg cctgcgtaag ctggagaggg aggacttgag ttcggacccc ctcgcagcct |
| 22801 | ggagtctcag tttaccgctt tgtgaaatgg acacaataac agtctccact ctccggggaa |
| 22861 | gttggcagta tttaaaagta cttaataaac cgcttagcgc ggtgtagacc gtgattcaag |
| 22921 | cttagcctgg ccgggaaacg ggaggcgtgg aggccgggag cagcccccgg ggtcatcgcc |
| 22981 | ctgccaccgc cgcccgattg ctttagcttg gaaattccgg agctgaagcg gccagcgagg |
| 23041 | gaggatgacc ctctcggccc gggcaccctg tcagtccgga aataactgca gcatttgttc |
| 23101 | cggaggggaa ggcgcgaggt ttccgggaaa gcagcaccgc cccttggccc ccaggtggct |
| 23161 | agcgctataa aggatcacgc gccccagtcg acgctgagct cctctgctac tcagagttgc |
| 23221 | aacctcMgcc tcgctatggc tcccagcagc ccccggcccg cgctgcccgc actcctggtc |
| 23281 | ctgctcgggg ctctgttccc aggtgagtcg gggtggggat tgccgtcggg ccagttctcc |
| 23341 | gaagccccgg gaggaccggc tcccgggtca ggtcatgcat gcttaggtag ctgtttatgg |
| 23401 | gaaggagggg ctagagacag cgattgaaag gcaacagcca gtaggttcga atccagaccc |
| 23461 | tgcatacctc cacgtgtggc cttgggctat agattgcagc tttaaaaaag ggtagggggt |
| 23521 | tggagatgga ggggaggggc gggcctcgtt ttgttgccca ggccggtctt gaactccggg |
| 23581 | ggtctagcct tacctcctgc ctcagcctcc cgaStagctg ggatgagagg tgtgaaccac |
| 23641 | cgccttgctt ggctagattg cgtctcttac agtttctcag Ytgtaaaacg ggaaacgtta |
| 23701 | tagcggccac ctggcagggt atcttggccc agcgcagcac ctggccccag gactcgatca |
| 23761 | tgatggtttg ggaacttggc tctgtgccaa cccaacaagg cttaagggac ccccaccccc |
| 23821 | ctcaagatgt atattctgtt cctcatcctc tctgcccctg gggaagtcca gggctgcttc |
| 23881 | tacttggggg aattccagag ctgacttatc cgtggcccaa agctgagaag tgggacRccc |
| 23941 | cagcacaccc tcccccagct ccagcccagc tagggaagag ggaaggggtc agagggtctt |
| 24001 | tcatggtggt gtaagtttgg ggaaccagga gggtggRaga ttgacagctt ggttaacagc |
| 24061 | tcaacaaagc ctgagatcca ggccagcacg gtagttcatg ccagtaatcc caacacttta |
| 24121 | ggagccccag gcgggcgaat cacttaaggt caggagtttg agaccagcct ggccaacatg |
| 24181 | gcaacatccc gtctctacta aaaatacaaa aattagctgg catggtggtg ggcgcctgtg |
| 24241 | atcccagctg ctcgggaggc tgagggagga aaatccctta agcccacgag gctgaggttg |
| 24301 | cagtgaacca agattgtgcc actgcactcc agcctgggag acatagcgag attctgtctc |
| 24361 | aaaaaacaaa gcRttctgat ccggactcag acccagatcg cactgctttc tagctgagta |
| 24421 | accatttctc tctatgaaat gggaatggtc ccagaatctc ccttggagaa tgtatggagc |
| 24481 | cagtgtcctc acacccccat ccaagataga acaaatctga gacaggaatc tttgagtgag |
| 24541 | gcagtgctgg gctcagacat tttttcccac cttcggaggc agcagaatYt gagggacctg |
| 24601 | atccaaataa gccccttctt tctttctttt cttttctttt tttttttttt ttttttttga |
| 24661 | gacggagtct cactNNgtcK cccaggctgg agtgcagtgg cgtgatctcg gctcactgca |
| 24721 | acctctgcct cccaggttca aacgattctc ctgYctcagc ctccctgagt agctgggact |
| 24781 | acaggcatgt gccatcacac ccggctaatc actgtgttag ccaggatggt ctcgatttcc |
| 24841 | tgacctcatg atctgcccac cctgcctccc aaagtgctgg gattacatgc gtgagccaca |
| 24901 | gtgcccaccc cgtaagcccc ttctttctta cctgcaaggt agccagttgc tacccatcct |
| 24961 | gtgctgagtt acttgtatta gcaagggatg gggtggctat actcacccac cttacagatg |
| 25021 | gggaaattga ggcccaaaga gggggaaact acRtgtctca gggagtgagg agccagtctg |
| 25081 | attcctggag ggctgactgt ctccacctga cttcttagga gggaggaggg caccaacttc |
| 25141 | acattaaaat ctggttggac acagtggctc acacctgtaa tcctggcatt ttgggaggct |
| 25201 | taggcgggag gatcacttga ggccaggagt ttgagaccag ccttagcaac atagtgagac |
| 25261 | cccatctcta caaaaatgtt tttcagggcc aggcgcggtg gctcacacct ataatcccag |
| 25321 | cactttggga ggctgaggcg ggcggattac ctgaggtcag gagtttgaga ccagcctgac |
| 25381 | caacatggag aaaccccgtc tctactaaaa gtacaaaatt acccgggcgt ggtggcgcat |
| 25441 | gcctgtaatc ccagctactc gggaggctga ggcaggagaa tcgcttgaac ctgggaggcg |
| 25501 | gaggttgcgg tgaactgaga tcgtgccatt gcactccagc ctgggcaaca agagctaaac |
| 25561 | tccgtctcaa aaaaaaaaaa atgtttttca aatattagcc gggtatggtg gtgtcctgta |
| 25621 | gtcccagcta cttgggaggc tgagatggga ggatcacttg agcccaggag ttcaaggtta |
| 25681 | cagtgagcta tgattgtgcc actgtattcc agcctgggta acagagggag acccgtttaa |
| 25741 | aaaaaaaaaa gtgatggcta aagtccttcc atggctccct attgccctca gtataaagaa |
| 25801 | cacatgtggc tgggcgtggt ggttcacgcc tgtaatccca gcactttggg aggctgaggc |
| 25861 | gggcggatca cttgaggcca ggagtttgag agcaggctgg ccgacgtggc gaaaccccgt |
| 25921 | ctctattaaa aatacaaaaa ttagctgggc gtggtggtgc ttgcctgtaa tcccagatac |
| 25981 | tctggaggct gaggcaggag aatMacttga acccgggagg caRaggttgc agtgagctga |
| 26041 | gattgYgcca ctgcactcca gtctgagtga caaagcgaga ctccatctca aaaaaaaaaW |
| 26101 | aaataaaaga acacatcttt agcatggcct tcagtgctca cgggatcttc ctgaattaat |
| 26161 | ctccccctct tcatccttgc tcactcagct ccagccaccc tgccccggga catctgtact |
| 26221 | tgcctggaac ttatttccct tttctccgga cagccagccc tttctcgtca tttagatctc |
| 26281 | tgctgaaaca ttaccctgtc accaaagcac tgtctattct atcaccctgt tttgtttttg |
| 26341 | tcaaagctca tattaacatc agttattaat tatcttgttt gctcataatt tttttttttt |
| 26401 | tttttttgga gacagagtct cgttctgttg ctcaggctgg agtgcagtgg cacaatcttg |
| 26461 | gctcactgta acctccacct cccaggttca agtgattctt gtgcctcagc ctcccaaata |
| 26521 | gctaggacta caggcacgtc ccaccatgcc cagctaattt ttgtattttt agtggagacg |
| 26581 | gggctttgtc atgttggcca ggctgatctc aaattcctga cctcaagtga tctgcccgcc |
| 26641 | ttggcctccc aaagtgctgg gattacaggc gtgagccacc acacccggcc tgctcatgaa |
| 26701 | ttttctcttt aacttccaca tcgaaggcaa agtattgtct tgttaaggct gtgcctccag |
| 26761 | cacccagcac aggctgggcg cacattccct tgatgaacct gatttgtaat gcctgtYgcc |
| 26821 | tcttccctcg tttcttctag gacctggcaa tgcccagaca tctgtgtccc cctcaaaagt |
| 26881 | catcctgccc cggggaggct ccgtgctggt gacatgcagc acctcctgtg accagcccaW |
| 26941 | gttgttgggc atagagaccc cgttgcctaa aaaggagttg ctcctgcctg ggaacaaccg |
| 27001 | gaaggtgtat gaactgagca atgtgcaaga agatagccaa ccaatgtgct attcaaactg |
| 27061 | ccctgatggg cagtcaacag ctaaaacctt cctcaccgtg tactgtgagt aactgagccc |
| 27121 | ggagggctgg actaggcaga ccSggtggga gagacgtgca gRggcacctg cagaggcctg |
| 27181 | ggggaatctt tgccacttgc tcgtagggtc aaggaggggc tccttgcagg gcaggtgggg |
| 27241 | acatccttgg aaagtccctt tgtgaatttc tttgggtaca attaaagtat ttacaggctg |
| 27301 | ggtgcggtgg ctcatgcctg taatcccagc actttgagag gctgaggctg gcggatcacc |
| 27361 | tgagatcagg agtttaagtt tcgccaacat ggcgaaaccc tgtctctgct gaaaatacaa |
| 27421 | aaatcagccg ggcatggtgt caagcgcctg taatcccagc tacttggaag gctgaggcag |
| 27481 | gagaacgctt gaacctgaga ggcagagatt gcagtgagcc gcgatcgtgc cagtgcactc |
| 27541 | cagtctggat aacagagcaa gattccatct caagaaaaaa aaaatgccat ctctctatgc |
| 27601 | ctcactcttt gaacatatga cacggtcctg cttcagacac tttaataaaa gatgcaaatt |
| 27661 | aagccaagtg tggtggcttg tacctataat cccaactact ccagaggctg aggcagaagg |
| 27721 | atggtttgag cccaggagtt tgagaccagc ctgggcaaca gagtgagacc ctgtttcttt |
| 27781 | cttttttttt tttttttttt tgagacggag tctcactctg tcgcccaggc tggagtgcag |
| 27841 | tggtgtgatc tcggctcact gcaagctccg cctcccgggt tcacgccatt ctcctgcctc |
| 27901 | agcctcccga gtagctggga ctacaggcgc ctgccaccat gcccggctca tttttttgta |
| 27961 | tttttagtag agacggggtt tcactgtgtt agccaggatg gtctcaatct cctgacctag |
| 28021 | tggtccgccc gcctcggcct cccaaagtgc tgggattaca ggtgtaagcc actgtgccca |
| 28081 | tccaagaccc tgtttctacc ggaaaaaaaa agtaaataat ttagctgggc atcgtggtgt |
| 28141 | gcacctgtaa tcccagctgc tcctgaggct gtgatgggag gattgcttta acccaggggt |
| 28201 | tcgaatccta ggagttcgaa tccatcctag gcaacatagc aaaaccccat ttttatttaa |
| 28261 | aaaaaaaaaa aaagatatga gttaaaacta gccctgggat ggcatttttc acatattggt |
| 28321 | aacaaacRaa agaattgatg gccgggcgca gtggctcacg cctgtaatcc cagcactttg |
| 28381 | ggaggccgag gcgggcggat cacaaggtca ggagatcgag accatcctgg ctaacatggt |
| 28441 | gaaaccccgt ctctactaaa actacaaaaa attagccggg catggtggca ggcgcctgtg |
| 28501 | gtcccagcta ctcaggaggc tgaggcagga gaatggcatg aacccgggag gcagagcttg |
| 28561 | cagtgagcca agatcgtgcc actgcactcc agcctgggcg acagagcaag actccatctc |
| 28621 | aaaaaaaaaa aaaaaaaaaa gaattgataa cagctgtgct gccaaggcta ttggaacgta |
| 28681 | ggaggtccta ggacagtgct gttgggagca taaataagcc caaccctgtg gcgggaaatt |
| 28741 | gggcatcagt tctcaaaatg tcatgggctg ggcacggtgg ctcacgcctg taatcccaSc |
| 28801 | actttgggag gctgagggag gcggatcact tgaggtcagg agttcgagac cagcctgacc |
| 28861 | accatggaga aaccccgtct ctattaaaaa tacaaaaaaa actagccagg catagtggca |
| 28921 | catacctgta atcccagcta ctcgggaggc tgaggcagga gaatctcttg aaactgggag |
| 28981 | gcagaggttg cggtgagctg agattgcgcc actgcactcc agcttgggca acaagagcaa |
| 29041 | aactccatct caaaaaaaaa aaaaaaagaa ataaaagaag gtatgttgaa tatgagtggt |
| 29101 | atgccaccct cacattaggg aagggcagtt tcggggaggc tgtatttatg tataaaatag |
| 29161 | ccctaMaagg aagtgggaga aatgacaata ttagctggct atgagaagag aggctgggag |
| 29221 | gctgtgggag agggcttggg tgtggagaat tctttttgtt ttttcctttt tttgagacag |
| 29281 | agtttcactc ttgttgccca ggctggagtg caatggcacg atctcagctc Mccgcaacct |
| 29341 | tcacctcctg agtttaagtg attctccggc ctcagcctcc cgactagctg ggattacagg |
| 29401 | catgggccac tacgcctggc aaattttgta tttttagtag agacagggtt tctccatgtt |
| 29461 | ggtcaggctg gtcttgaact ctgacctcag gtgatccgcc cgcctcggcc tcccaaagtg |
| 29521 | ctgggattac aacgtgagcc actttgcctg gctgagaatt ctttttttgt tgttgtcttt |
| 29581 | ttgagatgga gttttgctgt gtccccagcc tggagtgcaa tggtgtaatc tcagctcact |
| 29641 | gcaacctctc cctcccgggt tcaagcaatt ctcctgcctc agcctcccaa gtagctggaa |
| 29701 | ttacaggcgc ccagcaccac gccYggctaa tttttgtatt tttagtagag acgggatttc |
| 29761 | atcatgttgg ccRggctggt cttgatctcc tgaccttgtg atctgcccgc ctcggcctcc |
| 29821 | caaagtgctg ggattacagg cgtgagccac tgcccccagc cRagaatttc tctttgYgtc |
| 29881 | cttcctactt tggggacttc gaatggtggg aaagagttat caaggccaaa ataaggaatt |
| 29941 | caaatgaaaa caaaacaaaa tcaaagaaga aaaaacagaa gagcactggg caggctaggc |
| 30001 | acgtggctca tgcctataat cccagtgatt tagaaggccg aagtagaagg atcgcttgga |
| 30061 | ggccaggagt tggacaccag cctgggcaac atagcaagac cccatatcta caaaaaataa |
| 30121 | aaaacctaac caagcgtgct ggcatactag tagtcccagc tactcaggag gctgaggtgg |
| 30181 | gaggatcacc tgaKcctggg aggtccaggc tgtagtgagc cgtgatgaca ccactgcact |
| 30241 | ccagcctggg tgacagaKaa agaccctgtc tctaaaaaat aaaaactggc caagtagctt |
| 30301 | tgggattagc cttgggttcc agtcccagca aggcctttaa tagcttggga catgacttct |
| 30361 | gcatttactt tgcaatcagg tgagacctcc tctgatgggg aaaatgacac ggtgagtgac |
| 30421 | aaaggatgtt ctcctatcat tgtgtcaggg caaggaagcc tctgggtaaa tgatcaaatg |
| 30481 | atcagctttg cttctgattt ggagggtggg tgagcagatg ctgaccttcc caggtgaggg |
| 30541 | aagtccccRa acattcccag cagcttctgg aaaccccagg gaaacctctt tgaaggtctt |
| 30601 | ttctgcatct ctgcctgata ggtctttttt tttttttttt tttttttYtt ttttttgaca |
| 30661 | cacagtcttg ctctgtcgcc caggctggat cactgcaacc tccatctccc gggttcaagc |
| 30721 | agttctcctg cctcatcctc tccagtagct gggattacag gcacctggca ccacgcctgg |
| 30781 | ctaatttttg tatttttagt agagacaggg tttcgccaag ttggccaggc tggtctcgaa |
| 30841 | ctctagacct ctggtgatcc acccgcctca gcctcccgaa gtgctgggat tacaggcttg |
| 30901 | agccaccaYg cgcggctctg cctgatagct gagagcatag aactccaggt ttgagacctg |
| 30961 | gMtctgccac atttctccct ctatgactgt gggtgcccca ctttgcctta gtttttacct |
| 31021 | ctgtgaaatg gagcagatgg ctggcacagg tagcaaagga gtaaaagtta tgtgggaggg |
| 31081 | tggtacctga gagagactct agcttggtct tgccccaccc ctggtgtaaa cataaagaag |
| 31141 | cctccctgga tggctcaatc ttctccaaaa aggttagagg tgtaattcct agaggaggcg |
| 31201 | accactagct gggctttgaa ggatgtgtag gagttcataa ggacaggcat tctgggcagg |
| 31261 | aggaacagcc tgggcaaaag ttgggagcag ggagaaatct tgatggaggc aggaggagga |
| 31321 | ggaggtaggt tggtgtRggc caggYgcagt ggctcacacc tgtaatccca gtgctttggg |
| 31381 | aggccaaagc aagaggattg tttgagccca ggagttcgag accagcctgg gcaacatagc |
| 31441 | gagaccctgt ctctaagaaa aaataaaaaa attagggtac agtggcatat gcttgtattc |
| 31501 | tcaactactc tggaggctca agtgggagga tcaYttgaac ccaggaattt ttttgttttt |
| 31561 | gtttttgttt ttttgagatg gagtctcact ctgtggccca ggctggagtg cagtggtgcc |
| 31621 | atcttggctc actgcagcct cctccacctc ctgggttcaa ccgattctgc tgcctgagcc |
| 31681 | tcccgagttg ctgggattaa ggtgcccacc atcatgccca gctaattttt ttgtattttt |
| 31741 | agtagagata gggtttacca tgttagccag gctggtcttg aacgcctgac cgcaagagat |
| 31801 | cctcctgcct cagtttccca aagtgctggg attataggtg tgagccactg agcctggtca |
| 31861 | agcccaggaa tttgaggtta cagtcagcta tgattgcacc actgcattcc agcccaggtg |
| 31921 | acagagagag acactgcccc tNaaaaaaaa aaaaaaattg attgatggga ggaagggtga |
| 31981 | ggttggcaga gccttgaatg ccaggtggag gagctgggac tttccttctt ggggtgatag |
| 32041 | ggagtcatgg agggtttStg agcaggccag ggattagata gctgaaggct ggatttactg |
| 32101 | gaagccaaWg agcagttggc tatggtcctt gtccacgcgg cccatgttgt gggcagtgac |
| 32161 | cgtattcaag aagggaagga cagacaagta tttgaatact tcagtgacca ggatttggta |
| 32221 | aaggactgca ggtcagggtc aagaagaggt gagagcagga cagacttcct ccccgctgca |
| 32281 | ccaggcagct gagctgggtt tcctctaggg gctgaggttt gagggtacct caagttctgc |
| 32341 | aagagtctat aggaggtggt aagagagaag agctggaggt cagagttttc ttgactatat |
| 32401 | Rtatatatat ttttttgttt ttgtttttaa cagcttaaca gctttctgtt ttatttttag |
| 32461 | agacagggtc tcagggtctc actttgtcac ccaggctgga gtgcagtggt acaatcgtag |
| 32521 | ctgactgcag cctcaaactc ccaggctcaa gaaatcctcc tcccaccctt agcctcctga |
| 32581 | gtagcaggga ctacaggtgt gagccagcag gaagcccagc tggttttttt tttttctttg |
| 32641 | gtgttttttg tttgtttgtt tgagaccgga gtttcgctct tattgcccag gctgaagtgc |
| 32701 | aatggcagga tcttagctca ccacaacctc cgacccccag gatcaagcta ttctcttgcc |
| 32761 | tcagccacct gagtagctgg gattacaggc atgcgacacc acacaaggct aattttgtat |
| 32821 | ttttagtaaa gacagggttt ctccRtgttg gtcaggctgg tctYgaactc ccaacctcag |
| 32881 | atgatccacc tgcctcggcc tcccaaagtg ctgagattac aggcatgagc caccgtgccc |
| 32941 | ggcctttttt tttttttttt ttttNNtgag acagagtctc actctgtcgc ccaggcagga |
| 33001 | gtgcagtggt Kcgatctggg ctcactgcaa gctccgcctc ccgggttcac tccatcctcc |
| 33061 | tgccttagcc tcctgagtag ctgggactac aggcgcccac caccacgcct ggctaatttt |
| 33121 | ttgtattttt agtagagacg gggtttcacc gtgttagcca ggatggtctY gatctcctga |
| 33181 | cctcgtgatc cgcccgcctt ggcctcccaa agtgctggga ttacaggcgt gagccaccat |
| 33241 | gtctggcctg gccaggctgg tcttgaactc ctgacttccg gtgatccatc tgttctggcc |
| 33301 | tcccaaagtg ctgggattac aggcataagc caccacgcca tgccgaagcc cagcttgttt |
| 33361 | ttaatttttt tttttttttt tggagaaatg aggtcttgca atgttgccca agctagcctt |
| 33421 | gaactcctgg cctcaaatga ccccgccttg gcatcccaaa gtactgggat tacagatgtg |
| 33481 | agccaccatg ccccagcctt gctttcttga gatacRattt agaataccat aagattcatc |
| 33541 | ccttttaagc acataattca atgacttctg tacaaacaac catgactaca atctaatttt |
| 33601 | aaaatatYtc aatcactcta aaMaagaaac ctcctgctta tgtacagcga ctctgtctac |
| 33661 | ctcttaagtg aMttctccta cctttaatag ccctatttta cagttcagga aactgaggtt |
| 33721 | cagNgagaca aagtcactta cccacagcaa agaagcaagg ctgggtatca aatgcaggac |
| 33781 | ccccccKgtc ctgatgcttt tttttttttt ttttttttcc tctgagagag actctcactc |
| 33841 | tgtcactcag tctagagtac agtggcgcga tctcagttca ctgcaatctc tgcctcctgg |
| 33901 | gctgaagtaa tcctttcctc acaagtaaac ctcagcctct caagtagctg ggactacagg |
| 33961 | cacacaacac cacgcctggc taatttttgt atttttaggt agagacgggg tttcactatR |
| 34021 | ttggccaggc tggtcttSaa ctcctgacct caggtgatcc gcctgcctcg gccccccaaa |
| 34081 | gtgttgggat tacaggcgtg agccaccaca cgcagccttt ttgttattag actctgtcat |
| 34141 | tactgacttt tttttttttt taatagaaac agggtctttc tttcccaggS taaagtacag |
| 34201 | tggcatgatc acagttcact atagccttaa actcctgggc tcaagtgatc ctcctgcctc |
| 34261 | agcctcccaa gtagcaggga ctacaggtgt gcaccaccac acccagttaa ccattcattc |
| 34321 | attcattcat tcatttattt tgagatggag tctcgctctg tcacctaggc tggagtgcag |
| 34381 | tggcacgatc tcagctcact gcaacctcca cctcccaggt tcaagagatt ctcctgcctc |
| 34441 | agcctcccga gtagctgaga ctacaggcgt gcaccaccat gccagactaa tttttgtatt |
| 34501 | tttaatagag acggggtttc actctgttgg tcaggcttat ctcgaactcc tgacttcgtg |
| 34561 | gatccaccct ccttggcctc ccaaagtgct gggattaaag gcgtgagcca ccgcgccctg |
| 34621 | ccaacctttt tttaattttt cttagagatg ggggtctccc tatgttgccc aggcttgtct |
| 34681 | tgaactcctg gcctcaagtg accctSttgc cttggcctca caaagtgcta ggattacagc |
| 34741 | ctgagccatc acacctggcc aacaggtttt tttttttKtt ttgttttgtt ttttaaagaa |
| 34801 | tgtctaggcc aggctcattt actttcacct gtaatcccag cactttggga ggccggggtg |
| 34861 | ggcagatcac ttgaggtcag gaattcgaga ccagcctggg caacatgctg aaaccccgtt |
| 34921 | tctactaaaa atacaaaaat tagctgggtg tggtgacacg tgcctgtaat cccagctact |
| 34981 | caggaggttg aggcaggaga attgcttgaa cccaggaggc agaggttgca gtgagccaag |
| 35041 | atcatgccat caccctccag cctgggcgac agaaggagac tcagtctaaa aacttaatta |
| 35101 | attaattaat taaaaataaa aatacaaaaa ttaacctggt gtggtggtgt gtgcctgtaa |
| 35161 | tctaagctac tcaggaggct gaggcaggag aatcccctga atcccagagg cagaggttgc |
| 35221 | agtgagccaa gatcgagcca ctgtttgccc agtctagtgc actgggctgc tgaatttatt |
| 35281 | tgaccagaca cctagcaata gactttgaag ttcttttcca cttttcactc taagatgctg |
| 35341 | ctgtcatgaa taaggaatat tttgatcccc ttcacaaaca ctcggggccc tcttaccagt |
| 35401 | tttcactgaa gatcttgaca ttcctatctg cttaggtgtc tgggcgtgtt tgggggagat |
| 35461 | actgaagagg tagggctccc aggcaggtgc agttcgtctg ttaggcaggc agcaaggtcc |
| 35521 | acttcaccag acacccccac ctctgttttc ctRcagggac tccagaacgg gtggaactgg |
| 35581 | cacccctccc ctcttggcag ccagtgggca agaaccttac cctacgctgc caggtggagg |
| 35641 | gtggggcacc ccgggccaac ctcaccgtgg tgctgctccg tggggagaaS gagctgaaac |
| 35701 | gggagccagc tgtgggggag cccgctgagg tcacgaccac ggtgctggtg aggagagatc |
| 35761 | accatggagc caatttctcg tgccgcactg aactggacct gcggccccaa gggctggagc |
| 35821 | tgtttgagaa cacctcggcc ccctaccagc tccagacctt tggtgaggat tgaagaagcc |
| 35881 | agcagggaga aggtgggggt ggggtatcct gcaatgcggt gcctgtggcc acaggatctt |
| 35941 | ttgagatggg tgtggccccg gctaaggggt gcatgtgttc taggcgtatg tgacctaggc |
| 36001 | tgctgagtgg ccctggaaga ggatctcgca ggagggggaa tgaaatgccc cagagaaggg |
| 36061 | cttcgggacg tccatccctg tctgctcaca cctttcttct ctccctagtc ctgccagcga |
| 36121 | ctcccccaca acttgtcagc ccccgggtcc tagaggtgga cacgcagggg acMgtggtct |
| 36181 | gttccctgga cRgKctgttc ccagtctcgg aggcccaggt ccacctggca ctgggggacc |
| 36241 | agaggttgaa ccccacagtc acctatggca acgactcctt ctcggccaag gcctcagtca |
| 36301 | gtgtgacYgc agaggaYgag ggcacccagc ggctgacgtg tgcagtaata ctggggaacc |
| 36361 | agagccagga gacactgcag acagtgacca tctacagtaa gaaggggcag gggcggagtg |
| 36421 | gggcttcttg Rgggtgtgac ctgaacccgg ggcggggctc actgtgtgcc tattccaggc |
| 36481 | tttccggcgc ccaacRtgat tctgacgaag ccagaggtct cagaagggac cgaggtgaca |
| 36541 | gtgaagtgtg aggcccaccc tagagccaag gtgacgctga atggggttcc agcccagcca |
| 36601 | ctgggccYga gggcccagct cctgctgaag gccaccccag aggacaacgg gcgcagcttc |
| 36661 | tcctgctctg caaccctgga ggtggccggc cagcttatac acaagaaYca gacccgggag |
| 36721 | cttcgtgtcc tgtgtgagtg gggctgctgg tcaatggccc ctatccccca aggcccaatc |
| 36781 | tccctgaagg tcccataagg tcttgcctcc aagtcctgcc cccacccacc tccatgtcat |
| 36841 | ctcatcRtgt ttttccagat ggcccccRac tggacgagag ggattgtccg ggaaactgga |
| 36901 | cgtggccaga aaattcccag cagactccaa tgtgccaggc ttgggggaac ccattgcccg |
| 36961 | agctcaagtg tctaaaggat ggcactttcc cactgcccat cggggaatca gtgactgtca |
| 37021 | ctcgagatct tgagggcacc tacctctgtc gggccaggag cactcaaggg gaggtcaccc |
| 37081 | gcRaggtgac cgtgaatgtg ctctgtgagt gagccggcgg gcagagctgg gtgggggcag |
| 37141 | gggccatgga cctaatgcaa tcctcaccgc ctgttgtatc ctccccacag cccccYggta |
| 37201 | tgagattgtc atcatcactg tggtagcagc cgcagtcata atgggcactg caggcctcag |
| 37261 | cacgtacctc tataaccgcc agcggaagat caagaaatac agactacaac aggcccaaaa |
| 37321 | agggaccccc atgaaaccga acacacaagc cacgcctccc tgaacctatc ccRggacagg |
| 37381 | gcctcttcct cggccttccc atattggtgg cagtggtgcc acactgaaca gagtggaaga |
| 37441 | catatgccat gcagctacac ctacYggccc tgggacgccg gaggacaggg cattgtcctc |
| 37501 | agtcagatac aacagcattt ggggccatgg tacctgcaca cctaaaacac taggccacgc |
| 37561 | atctgatctg tagtcacatg actaagccaa gaggaaggag caagactcaa gacatgattg |
| 37621 | atggatgtta aagtctagcc tgatgagagg ggaagtggtg ggggagacat agccccacca |
| 37681 | tgaggacata caactgggaa atactgaaac ttgctgccta ttgggtatgc tgaggYccca |
| 37741 | cagacttaca gaagaagtgg ccctccatag acatgtgtag catcaaaaca caaaggccca |
| 37801 | cacttcctga cggatgccag cttgggcact gctgtctact gaccccaacc cttgatgata |
| 37861 | tgtatttatt catttgttat tttaccagct atttattgag tgtcttttat gtaggctaaa |
| 37921 | tgaacatagg tctctggcct cacggagctc ccagtcctRa tcacattcaa ggtcaccagg |
| 37981 | tacagttgta caggttgtac actgcaggag agtgcctggc aaaaagatca Ratggggctg |
| 38041 | ggacttctca ttggccaacc tgcctttccc cagaaggagt gatttttcta Ycggcacaaa |
| 38101 | agcactatat ggactggtaa tggttacagg ttcagagatt acccagtgag gccttattcc |
| 38161 | tcccttcccc ccaaaactga cacctttgtt agccacctcc ccacccacat acatttctgc |
| 38221 | cagtgttcac aatgacactc agYggtcatg tctggacatg agtgcccagg gaatatgccc |
| 38281 | aagctatgcc ttgtcctctt gtcctgtttg catttcactg ggagcttgca ctatgcagct |
| 38341 | ccagtttcct gcagtgatca gggtcctgca agcagtgggg aagggggcca aggtattgga |
| 38401 | ggactccctc ccagctttgg aagcctcatc cgcgtgtgtg tgtgtgtgta tgtgtagaca |
| 38461 | agctctcgct ctgtcaccca ggctggagtg cagtggtgca atcatggttc actgcagtct |
| 38521 | tgaccttttg Rgctcaagtg atcctcccac ctcagcctcc tgagtagctg ggaccatagg |
| 38581 | ctcacaacac cacacctggc aaatttgatt tttttttttt ttYcagagac ggggtctYgc |
| 38641 | aacattgccc agacttcctt tgtgttagtt aataaagctt tctcaactgc ctcagccttg |
| 38701 | tgtgagttga ggggaggtgt cacatccagc tggagtcctt tctaagcagc cacagcctga |
| 38761 | tcctcccact tcctccccca agaaaacatt gtgggttgat ggYcataccc tgaggttctg |
| 38821 | gtccaaatcg gactttctat gaccttctgg gtctctagtg aaaactaaag actcctctcc |
| 38881 | agaaaaaaac atttggtttc taatgaggcc tggaatctta ttcttgacct ggggagcgga |
| 38941 | atcccttttt gcagtactcc cgggccctct gttggggcct ccccttcctc tccagggtgg |
| 39001 | agtcgaggag gcggggctgc gggcctcctt atctctagag ccggccctgg ctctctggcg |
| 39061 | cggggcccct tagtccgggc tttttgccat ggggtctctg ttccctctgt cgctgctgtt |
| 39121 | ttttttggcg gccgcctacc cgggagttgg gagcgcgctg ggacgccgga ctaagcgggc |
| 39181 | gcaaagcccc aagggtagcc ctctcgcgcc ctccgggacc tcagtgccct tctgggtgcg |
| 39241 | catgagcccg gagttcgtgg ctgtgcagcc ggggaagtca gtgcagctca attgcagcaa |
| 39301 | cagctgtccc cagccgcaga attccagcct ccgcaccccg ctgcggcaag gcaagacgct |
| 39361 | cagagggccg ggttgggtgt cttaccagct gctcgacgtg agggcctgga gctccctcgc |
| 39421 | gcactgcctc gtgacctgcg caggaaaaac acgctgggcc acctccagga tcaccgccta |
| 39481 | cagtgaggRa caggggctcg gtcccggctg gggtgagggg agggggctgg aagaggtggg |
| 39541 | ggaagggtag ttgacagtcg ctctataggg agcgcccgcg gacctcactc agaggctccc |
| 39601 | ccttgcctta gaaccgcccc acagcgtgat tttggagcct ccggtcttaa agggcaggaa |
| 39661 | atacactttg cgctgccacg tgacgcaggt gttcccggtg ggctacttgg tggtgaccct |
| 39721 | gaggcatgga agccgggtca tctattccga aagcctggag cgcttcaccg gcctggatct |
| 39781 | ggccaacgtg accttgacct acgagtttgc tgctggaccc cgcgacttct ggcagcccgt |
| 39841 | gatctgccac gcgcgcctca atctcgacgg cctggtggtc cgcaacagct cggcacccat |
| 39901 | tacactgatg ctcggtgagg cacccctgta accctgggga ctaggaggaa gggggcagag |
| 39961 | agagttatga ccccgagagg gcgcacagac caagcgtgag ctccacgSgg gtcgacagac |
| 40021 | ctccctgtgt tccgttccta attctcgcct tctgctccca gcttggagcc ccgcgcccac |
| 40081 | agctttggcc tccggttcca tcgctgccct tgtagggatc ctcctcactg tgggcgctgc |
| 40141 | gtacctatgc aagtgcctag ctatgaagtc ccaggcgtaa agggggatgt tctatgccgg |
| 40201 | ctgagcgaga aaaagaggaa tatgaaacaa tctggggaaa tggccataca tggtggctga |
| 40261 | cgcctgtaat cccagcactt tgggaggccg aggcaggaga atcgcttgag cccaggagtt |
| 40321 | cgagaccagc ctggacaaca tagtgagacc ccgtctatgc aaaaaataca caaattagcc |
| 40381 | tggtgtggtg gcccgcacct gtggtcccag ctacccggga ggctgagttg ggaggatcct |
| 40441 | ttgagccctg aaagtcgagg ttgcagtgag ccttgatcgt gccactgcac tccagcctgg |
| 40501 | gggacagagc acgaccctgt ctccaaaaat aaaataaaaa taaaaataaa tattggcggg |
| 40561 | ggaaccctct ggaatcaata aaggcttcct taaccagcct ctgtcctgtg acctaagggt |
| 40621 | ccgcattact gcccttcttc ggaggaactg gtttgttttt gttgttgttg ttgtttttgc |
| 40681 | gatcactttc tccaagttcc ttgtctccct Ragggcacct gaggtttcct cactcagggc |
| 40741 | ccacctgggg tcccgaagcc ccagactctg tgtaKcccca gcgggtgtca cagaaacctc |
| 40801 | tccttctgct ggccttatcg agtgggatca gcgcgggccg gggagagcca cgggcagggg |
| 40861 | cggggtgggg ttcatggtat ggctttcctg attggcgccg ccgccaccac gcggcagctc |
| 40921 | tgattggatg ttaagtttcc tatcccagcc Scaccttcag accctgtgct ttcctggagg |
| 40981 | ccaaacaact gtggagcgag aactcatctc caaaataact taccacgctg gagtgagacc |
| 41041 | acgaatggtg gggaggggag ggtcccacgg acatattgag ggacgtggat acgcagaaga |
| 41101 | ggtatccatg tggtggcagc cgggaagggg tgatcagatg gtccacaggg aatatcacaa |
| 41161 | actcgaattc tgacgatgtt ctggtagtca cccagccaga tgagcgcatg gagttggSgg |
| 41221 | tggggggtgt caaagcttgg ggcccggaag cggagtcaaa agcatcaccc tcggtccctt |
| 41281 | gttctcgcgt ggatgtcagg gccYccaccc accgagcaga aggcggactc aggggcgctc |
| 41341 | cagggtggct cgagctcaca cacgctgagt agacacgtgc ccgctgcacc ctgggtaaat |
| 41401 | acagacccgg agccgagcgg attctaattt agacgcccgc gaacgctgcg cgcacgcaca |
| 41461 | cgtgtcctcg gctcgctggc actttcgtcc cgccccctcc gtcgcgtgcS ggagctgacc |
| 41521 | cggaggggtg cttagaggta tggctccgcg gggtcaaaag gagaaggatc agtgagagag |
| 41581 | gcatccccac accctcccct agaactgtcc tttccccatc cagtgcctcc caaatctctc |
| 41641 | ttagtcccca aatgtatccc cgccctaagg ggcgctggtg ggaggagcta aatgtggggg |
| 41701 | cggRgctcgg agtccagctt attatcatgg catctcagcc agggctgggg taggggtttg |
| 41761 | ggaagggcaa cccagcatcc cccgatccca gagtcgcggc cggggatgac gcgagagagc |
| 41821 | gtggtcgccc ccagaaggcc ctgggccatc atgccggcct ccacgtagac cccaggggtc |
| 41881 | gctcactcct gccagctcgc cttcaccaag gccaggagct tagcgcacgc tcgcctcccg |
| 41941 | cccccccgcc gcctctgccg ccgccccctc cttggaaacc aagttaccaa cgttaaacca |
| 42001 | atccccaagc gcaactctgY ctcccccaca ccccacccgc cgcgccgcgc ggagccgtcc |
| 42061 | tctagcccag ctcctcggct cgcgctctcc tcgcctcctg tgctttcccc gccgcggcga |
| 42121 | tgccagggcc ttcgccaggg ctgcgccggg cgctactcgg cctctgggct gctctgggcc |
| 42181 | tggggctctt cggcctctca ggtaagagcY ccgctctggt tcggggtgga cagggcgggg |
| 42241 | gcggagtccc tggacctgag aaacggcctc ctgtccctcc cagctctgcc ctcgcctcgc |
| 42301 | tSccacgcct ctgcccccac ctcgagcctg agtcttctcc ccttccccct cctccccaac |
| 42361 | acacacccga gccccagctt cctgactcct cgatagcccc tacccgcttc gagatcctag |
| 42421 | gtgttcttcc gcacccaacc cttcgccctg gagacccagt gtctctcctg tccgctcccc |
| 42481 | gggtacctcc ttacgctStg ctgtgcacca tggtccacgR actggcatct tccccactcg |
| 42541 | cggtccgcga agactccatc tctccaacta ccctgactca gaggcgctgt tcccgctcca |
| 42601 | cccagaRccc tggcaaccgg gtccctcagc tgttcccgcg gttccttcca tgagcccagc |
| 42661 | cttgcgtccc ggcKccgtgt tcttcaccgg gtgtagggtc cttcctgatc cttgacccag |
| 42721 | cctcgtctct cctttgccct tgccgcaaac gcactctcct cgtatcccgg cattctgcca |
| 42781 | ggaccctgag aactggttca tcccccatcc cccatcccgg gtccccttct ctcagccttg |
| 42841 | ctgtgttcat ccaagaaccc acctttcctc tcctctacgc cctcccccca tgctttcccg |
| 42901 | ccgctccatc ggcgctttgg agaccatgSc tctctgctac cacgtcccag agacaccctc |
| 42961 | gaggtttaga ctctgggagt gcgcctttaa accggaggcc tgggcaSgac gcgggacgcc |
| 43021 | tgggttcttt ccctggctgS agcctctcct cctcctcccc gccctctgag aacccttgac |
| 43081 | tcgacatagg ggcgctaaga tgtcagggag ttggctcccc aggctcagcc cgcgtttccc |
| 43141 | tgggcagcgg tctcgcagga gcccttctgg gcggacctgc agcctcgcgt ggcgttcgtg |
| 43201 | gagcgcgggg gctcgctgtg gctgaattgc agcaccaact gccctYggcc ggagcgcggt |
| 43261 | ggcctggaga cctcgctgcg ccgaaacggg acccagaggg gtttgcgttg gttggcgcgg |
| 43321 | cagctggtgg acattcgcga gccggagact cagcccgtct gcttcttccg ctgcgcgcgg |
| 43381 | cgcacactac aggcgcgtgg gctcattcgc actttccgtg agttctgggt ggccacgcgc |
| 43441 | gtactccact actctccctc cctcccaggc cccgccccct gggtcccagg gtcctcccct |
| 43501 | tcaggcccca ccttctgttc caagtcccgg Ygttcaaaga gctgcggact cttccccctt |
| 43561 | gcagagcgac cagatcgcgt agagctgatg ccgctgcctc cctggcagcc ggtgggcgag |
| 43621 | aacttcaccc tgagctgtag ggtccccggc gccgggcccc gtgcgagcct cacgctgacc |
| 43681 | ctgctgcggg gcgcccagga gctgatccgc cgcagcttcg ccggtgaacc accccgagcg |
| 43741 | cggggcgcgg tgctcacagc cacggtactg gctcggaggg aggaccatgg agccaatttc |
| 43801 | tcgtgtcgcg ccgagctgga cctgcggccg cacggactgg gactgtttga aaacagctcg |
| 43861 | gcccccagag agctccgaac cttctgtgag tgggtgtggg gaggagatgg ggacccagtg |
| 43921 | gggtcggtcg gtgtttagga ggtttagagg tagatacatc tgaatgctga ccccgacttc |
| 43981 | aaccctcgcc ggctgagctg tttccccctc cgtgccttga ggRKgataat acgataagat |
| 44041 | agtgcatgtc aagtgcttag gacatattga gcgctcggag ttagttcaaa cttggttctt |
| 44101 | cgacccctag ccctgtctcc ggatgccccg cgcctcgctg ctccccggct cttggaagtt |
| 44161 | ggctcggaaa ggcccgtgag ctgcactctg gacggactgt ttccagcctc agaggccagg |
| 44221 | gtctacctcg cactggggga ccagaatctg agtcctgatg tcaccctcga aggggacgca |
| 44281 | ttcgtggcca ctgccacagc cacagctagc gcagagcagg agggtgccag gcagctgRtc |
| 44341 | tgcaacgtca ccctgggggg cgaaaaccgg gagacccggg agaacgtgac catctacagt |
| 44401 | aaggaaggag gcggggtctc cgcggctccg aggtgggacc agaggaatgc gaaggcgggg |
| 44461 | cgaagagtgg gcgggacctc agtaccggaa caggcgtgKc ccgaggggcg gggcaggtgg |
| 44521 | gggcggagac gtaatcgctg gggaggagga gcctgtacag cctgagaggc ggggcgccgt |
| 44581 | accctagttc gttctcagca ccccgaggat tcgggcagat aaggggcggg ccttgaccgg |
| 44641 | agggaggggt atggtcagta tactacgacc aaatgctccg cccccaggct tcccggcacc |
| 44701 | actcctgacc ctgagcgaac ccagcgtctc cgaggggcag atggtgacag taacctgcgc |
| 44761 | agctgggRcc caagctctgg tcacactgga gggagttcca gccgcggtcc cggggcagcc |
| 44821 | cgcccagctt cagctaaatg ccaccgagaa cgacgacaga cgcagcttct tctgcgacgc |
| 44881 | caccctcgat gtggacgggg agaccctgat caagaacagg agcgcagagc ttcgtgtcct |
| 44941 | atgtgagttg gtgataaccc ctcgcccccc accttctggt gacttccaag gacccgcctg |
| 45001 | ctYcctcacc gtgtcgtgga ggcggagcca tttcttacgt ctaagcctct gtaaccccac |
| 45061 | gccctgcccg cagacgctcc ccggctagac gattcggact gccccaggag ttggacgtgg |
| 45121 | cccgagggcc cagagcagac gctgcgctgc gaggcccgcg ggaacccaga accctcagtg |
| 45181 | cactgtgcgc gctccgacgg cggggccgtg ctggctctgg gcctgctggg tccagtcact |
| 45241 | cgggcgctct caggcactta ccgctgcaag gcggccaatg atcaaggcga ggcggtcaag |
| 45301 | gacgtaacgc taacggtgga gtgtgagtgg gggtgcgcag RgtgcaYttc tatctggttc |
| 45361 | aaggtctgga gggtggccag cctccaggga agagtaggag tagggtatga ggtgtccctt |
| 45421 | tgggtgaggt tttgggaaag ggaagaggct ggttagtggg gttggagaaa gatcttggag |
| 45481 | gatggaaggg accgggtggg cgtgccccta gcctagggcg tggtatttgg gcggagtcgt |
| 45541 | ggaaaggcgg gcagtccaga gtgtttaagt ttttagRcga aaaaggcgcc actggtggct |
| 45601 | caggaagctc ccagacagag tgcatgSctc gactagcgtg acacctcctt ggatcggcgt |
| 45661 | ccaagggtta tgcagggaca acacttcgtg gaagccttgc cgcgccaagg agggtctagg |
| 45721 | gacgtcagat ttgcccccaa accccaaagc caacaataca ctccctcctc cagacgcacc |
| 45781 | agcgctggac agcRtgggct gcccagaacg cattacttgg ctggagggaa cagaagcctc |
| 45841 | gctgagctgt gtggcgcacg gggtaccgcc gcctgatgtg atctgcgtgc gctctggaga |
| 45901 | actcggggcc gtcatcgagg ggctgttgcg tgtggcccgg gagcatgcgg gcacttaccg |
| 45961 | ctgcgaagcc accaaccctc ggggctctgc ggccaaaaat gtggccgtca cggtggaatg |
| 46021 | tgagtagggg caccgcggag ttaggcagga tctgtgggac aaccccggct ggacttcctg |
| 46081 | gcccccgtgt gagcccctgc aatcctgttt cccagatggc cccaggtttg aggagccgag |
| 46141 | ctgccccagc aattggacat gggtggaagg atctgggcgc ctgttttcct gtgaggtcga |
| 46201 | tgggaagcca cagccaagcg tgaagtgcgt gggctccggg ggcRccactg agggggtgct |
| 46261 | gctgccgctg gcacccccag accctagtcc cagagctccc agaatcccta gagtcctggc |
| 46321 | acccggtatc tacgtctgca acgccaccaa ccgccacggc tccgtggcca aaacagtcgt |
| 46381 | cgtgagcgcg gagtgtgagc gaggcccagg cgggtaggga gcaggggtgc cccacggtcc |
| 46441 | aggcactccc tgacatcccc catggctgYt ttgcagcgcc accggagatg gatgaatcta |
| 46501 | cctgcccaag tcaccagacg tggctggaag gggctgaggc ttccgcgctg gcctgcgccg |
| 46561 | cccggggtcg cccttcccca ggagtgcgct gctctcggga aggcatccca tggcctgagc |
| 46621 | agcagcgcgt gtcccgagag gacgcgggca cttaccactg tgtggccacc aatgcgcatg |
| 46681 | gcacggactc ccggaccgtc actgtgggcg tggaatgtga gtgggggcag caccggatgg |
| 46741 | aggggacacg gtcctcggaa gaatgactcg cagcggtggg agcattcaag ggcacctctc |
| 46801 | ccaatcccat tctcggggac agggaattcc agcctaaacc agggggtaat gaaaattcta |
| 46861 | gccaggcgca gtggctcagg tctgtaatcc caacactttg gaaggttgag gcggatgaat |
| 46921 | cacttgaggc caggagttcg agaccagccc ggccaacatg gcgaaaaccc gtctctacaa |
| 46981 | aaattagccg gtcgtggtSg tgggcgcctg tggtcccagc tacttgggag gctgaggcag |
| 47041 | gagaatcgct tgagcctggg aggcagaggt tgcagggagc cgagatcccg ccactgcact |
| 47101 | ccagcctggg caacagagtg agactctttc ttagaaaaac agaaaaagaa aattataggg |
| 47161 | aataggagca cggccctcct caaatcctgg attagaacac tgacctgggc ttcacctcct |
| 47221 | tccattcggt gaagaagggc gaggaatttt agccgcaaca gcagYctgat tgtcggggaa |
| 47281 | ggaggctctg ataggaggca ggatcctctt ctgcccatca gaggcgcggt ggtctcccat |
| 47341 | cgatcgttgt gggccggagc agggcatttg atcagtggct gggccggcgc taagccccac |
| 47401 | ttcaccttct gtgcccttca gaccggccag tggtggccga acttgctgcc tcgccccctg |
| 47461 | gaggcgtgcg cccaggagga aacttcacgt tgacctgccg cgcRgaggcc tggcctccag |
| 47521 | cccagatcag ctggcgcgcg cccccgRggg ccctcaacat cggcctgtcg agcaacaaca |
| 47581 | gcacactgag cgtggcaggc gccatgggaa gccacggcgg cgagtacgag tgcgcaScca |
| 47641 | ccaacgcgca cgggcgccac gcgcggcgca tcacggtgcg cgtggccggt MMgtggcagc |
| 47701 | tggggagagg cggggcgagg tatctgagag ggggcgtgac ctgggtcttg gggcggccgg |
| 47761 | ccccgcctgc ctccctctcg gtcccggKag actagRcggW agtgggacag aRtagaagtc |
| 47821 | aaaggtgcct tagcgggtgg ggctgttgat cgcactttga ggggtgggag atggaggtgg |
| 47881 | cagggggact gaattcaagg ggagggaccc tccggggctg tcactgctgc aggaaaggac |
| 47941 | tttaaaactt gggctggatt ctgcgtggYg gaaacttgac ccaattcaca atccactgtg |
| 48001 | gggaagattg gggagggacc aaagtcattg gatgWtggag ggagagaggg gtcaagatcg |
| 48061 | ccttctctca cttcctgaag ctcctggggc tgggttctct ctggggtcgg gggaacctga |
| 48121 | cctggtcctg ccggtcctca ttttttgggg gatggggaga gttgacttgt cgccaggggg |
| 48181 | ctaagtgtgg tcacgggttt atatccccat gggctgaagt gcgatataaa tcgggactcg |
| 48241 | ggtcgccctg gcactgggag tggccttatt gcatgggttg tctcccttct cccaaggcca |
| 48301 | gacagtgagc tccccggggc atgaggactg acttcgtgcc tgtgggagtg cggggggcgg |
| 48361 | tgggagaagc cccccggagc ttggccaccc tccgcgaggg tctccacccc gcaggtccgt |
| 48421 | ggctatgggt cgccgtgggc ggcgcggcgg ggggcgcggc gctgctggcc gcgggggccg |
| 48481 | gcctggcctt ctacgtgcag tccaccgcct gcaagaaggg cgagtacaac gtgcaggagg |
| 48541 | ccgagagctc aggcgaggcc gtgtgtctSa acggagcggg cggcggcgct ggcggggcgg |
| 48601 | caggcgcgga gggcggaccc gaggcggcgg ggggcgcggc cgagtcgccg gcggagggcg |
| 48661 | aggtcttcgc catacagctg acatcggcgt gagcccgctc ccctctcccc gcgggccggg |
| 48721 | ggacgccccc cagactcaca cgggggctta tttattgctt tatttattta cttattcatt |
| 48781 | tatttatgta ttcaactcca agggcgtcac ccccattttc taSccatccc ctcaataRag |
| 48841 | tttttataaa ggaactccct gtctccgctt ctgtttctgc aaggtggaac aagSccaggg |
| 48901 | ttccagtcgt gacctcccga gttattcatt caaWaagcga tttttgagag ggcctggggt |
| 48961 | ggtggcttag gcctgtaatc ccaggacttg tgggaggccc aggtgggagg atcccttgca |
| 49021 | cccaagagtt tcagaccagc ctgggcaaca tagggagacc ctacaaaaaa tatttttcaa |
| 49081 | aaattagcca aggccggtcg cggtggctca tgcgtgtaat cccaggactt tggaaggccg |
| 49141 | aggcggccag atcacgaggt cgaggtcatg agatcgagac catcctggcc aatatggtga |
| 49201 | aaccctgtct ctactaaaaa tacaaaaatt agctgggcat ggtggtgcRc gcctgtagtc |
| 49261 | ccagctattc gggaggctga ggcaggagaa tcgctttaac cccggaggca gaggttgcag |
| 49321 | tgagccgaga tcgtgccact gaactccagc ctggcgacag agcgagattc cgtcttaaaa |
| 49381 | aaaaaaccag gcgtggtggc tcacgcctgt aatcccagca ctttgggagg ccgaggcggg |
| 49441 | cggatcacga ggtcgggaga tcgagaccat cctcgctaac acggtgaaac cccgtctcta |
| 49501 | ctaaaaatMc aaaaaaaaaa aaaaaaaaaa aattagccga gcgtggtggc gggcgcctgt |
| 49561 | agtcccagct actcaggagg ctgaggcagg agaatggcat gaacccgggg agcagagctt |
| 49621 | gcagtgagcc gagatcgcgc cactgcactc caccctggca gacagcaaga ctccgtctca |
| 49681 | aaaaaaaaaa aaaaaattag ccagggccga gcacagtRct ctcgcttgaa tcccagaact |
| 49741 | ttgggaaact aaggcggggg gggggggtca cttgaggtca ggagttcgag accaccctgg |
| 49801 | ccaacgtggt gaaacacctt ctctaccaaa aatacaaaaa aattaaggcc gggtgaagtg |
| 49861 | gctcacgtct gtaatcccag cactttgcga ggctgaggcg ggcggatcat ggggttagaa |
| 49921 | gatcaagact gtcctggcta acatggtgaa accccgtcac taMtaaaaac acaaaaatta |
| 49981 | gccgggcgtg gtggcacatg cctgtagtcc cagctactca agaggctgag gcaggagaat |
| 50041 | cgctttaacc ccggaggcag aggttgcagt gagccaagat cgcaccactg cactccagcc |
| 50101 | tgggcaatag agcgagactc tgtctcaaaa aaaaaccaaa aacaaaaaca aaaaaataca |
| 50161 | aaaatttagc tgggctgtag tggcacacgc cctgtaatcc cagctactcg tgaggctgag |
| 50221 | gcaggagaat tgctagaacc cgggaggtag agatcttgcc attgcactcc agcctgggca |
| 50281 | acagaactag actttgtctc aaaaaaaaaa aaaaaaaaaa aaaagtgttt tttgaggggg |
| 50341 | ctgggcatgg tggctcaagc ctgtaatccc aggacttttg ggaggcccag gtgggaggat |
| 50401 | cccttgtgcc cacgagtttc agaccagcct gggcaacata gcgagaccct acaaaaaaac |
| 50461 | atgtttcaaa aaaaaatttt tttttttgag atggagtctc gctctgtcgc ccaggctgga |
| 50521 | cagcagtggc actatctctg ctcactgcaa gctccgtctc ccgggttcat gccattctcc |
| 50581 | tgcctcagcc tcccaagtag ctgggattac aggcgcctgc caccacaccc agctaatttt |
| 50641 | tttttgtatt tttagtagag atgggatttc accgtgttcg ccaggatggt ctctattcct |
| 50701 | gacctcgaga tccacccgcc tcagcctccc aaagtgctgg gattacaggc gtgagccacc |
| 50761 | gcgcccggcc tcaaaaaaaa aatttttttt ttgagatgga gtcttgctct gtcacccagg |
| 50821 | ctggagtgct gtggtgtgat cttggctcac tgcaacctct gcctcctggg ttcaagcaat |
| 50881 | tcccctgcct tggcttccca aatagctggg actataggca tgcaccacca cacccagcta |
| 50941 | atttttgtat ttttagtaga gacagggttt caccatgttg gccaggctgg tctcgaactc |
| 51001 | ctgacctaag gtgatccacc tgcctcggtc tcccaaagtg ctgggattac agctgtaagc |
| 51061 | caccatgcct ggtgtatttt tcaaaaatta gccagacatg gtggtgcatg cctgtagtcc |
| 51121 | cagctacttg ggaggctgag gcaggaggat cctttgagcc taggaggtca aagccacttc |
| 51181 | cagctatgat atYgtcattg tgctccagcc caggtgacag aaccagaccc tgtctctaaa |
| 51241 | aacaaacaac gaaaaaatcc aaaaactttt tttgaacacc tactatgcat caggcacaat |
| 51301 | ctaagctgtc tttttctttt tctttttttt ttttttttga gacggagtct ctctgtcgcc |
| 51361 | caggctggag tgcagtggtg taatctcagc tcactgcaag ctctgcctcc cacgttcaag |
| 51421 | cgattttcct gcctcagcct cctgagtagc tgggattaca ggcgcgcgcc accactacgc |
| 51481 | ccggctaatt tttgtatttt tagtagagac agggtttcac catgttggtc aggctagtct |
| 51541 | ggaactactg acctcgtgat tcacctgcct cggtctccca acgtgctgga attacaagcc |
| 51601 | tgagccactg tgcctggccc ggctggctgt cttttctcag tgtgacctag agctcgtcct |
| 51661 | ctctcagtgc ctgttttctg ctctcttcac acccttgggc aggggtgggg gcctcactcc |
| 51721 | ttcctcctac ttatctcttc cacccagcac tgccctctga tccgggtcac tcttggaggt |
| 51781 | gggggctagg tgcttccccc aggcctggtt accggcagag ctgaggccgc cttgccaggg |
| 51841 | tgggtggagg ccctctccgt tgtgcccctg ccctgagact tcggtgagac cttcctgggc |
| 51901 | aggcactggc tgatgctatg ggtgtcagcc cttagcatgt cctccctgtt aaagggggca |
| 51961 | cccctgcccc gccctcaatg cctcctttgt cctgtgtcca cccacagtgc ttcagtttac |
| 52021 | ccccaccctg cctttccact cagcccatca tgattcagaa cagacacaca cagggtatcc |
| 52081 | gctgcaaccc ccactacacg gcaccttccc ccctcatccc caacagcata aggcacagca |
| 52141 | gctgggcctc ctccccacag cctcctcctc tgcccctcct ccctcaaaag caggaacacg |
| 52201 | gagccctaga gaaggaagcc agtcccatgc aaacatgtaa tgagcaaaga tgagacgggg |
| 52261 | aaatggcaca agagggcagg ccagtgctcg gtgctggagc caggggccag gtataacacc |
| 52321 | caaaaaggca ccagccaggt gcagtccctg ccactaacag cacctcacct tttctgcctg |
| 52381 | tgccctccct acttaatgat ctctctccgc tcctactgac ctcaaggtct ctttcagagc |
| 52441 | cttcagatga gatatttatt ttagtaggtt ggtgcaaaag taattgctgt ttttgccatt |
| 52501 | gaaagtaatg gcaggcaggg catggtggct cacgcctgta atcccagcac tttgggaggc |
| 52561 | cgaggtgggc agatcacgag gtcaggagtt caagaccagc ctggctaaca tggtgaaacc |
| 52621 | ctgtctctac taacaataca aaaaaaatta gccggacatg gtggcacacc cctgtagtct |
| 52681 | cagctacttg ggaggctgag gcaggagaac tgcttgaacc ctgaagcgga ggctgcagtg |
| 52741 | agctgaaatc acgccactgc actccagcct gggccacaga gtgagactgt ctcagaggaa |
| 52801 | aaaaaaaaaa aaaaagtaat ggcaaaaact gcaattactt tttctttttc tttctgtttt |
| 52861 | tttttttgtt tgtttgtttg tttgtttgtt tgtttgagac ggagtctcac tgtgtggccc |
| 52921 | aggctggagt gcagtggcgc aatcttggct tactgcagcc tccgcctccc aggttcaagt |
| 52981 | gattctctcc tgcctcagcc tcccaatagg attacaggca cccaccacta tgcctggcta |
| 53041 | atttttgtat ctttagcaga gatggggttt caccatgttt gccaggctgg tctcgaactc |
| 53101 | ctgatccacc cacctcagct tcccaaagtg ctgggattac aggcaggcat gagccatggt |
| 53161 | gcccgacatt tttttttttt tttctttttt tttttgagac agagtctcac tttgtcaccc |
| 53221 | aggctggagt gcaaaggcaa gatctcactg cagcctctgc ctcctgggtt aaagcgattc |
| 53281 | tcccacctta gccccctgag taggtgagat tacaggcaca tgccaccaca cctgcctaat |
| 53341 | ttttgtattt ttaatagaga gggggtttca ccattttgtc cacgctggtc tcgaactcct |
| 53401 | gacctcaagg gattcgccca cctcagcctc ccaaagtgct gggattacag gcatgagcca |
| 53461 | ccacgcccga cctccttaac tcttttattt ccttgcacac tttttctctg tagcccagct |
| 53521 | cacaacttaa catcctctta gacatacacc tgaggttttt tttttttttt tttttgagag |
| 53581 | ggagtctctc tctgtcaccc aggatggaat gcagtggtgt gctctcagct cactgcaacc |
| 53641 | ttgcaaccac tgcctcccag gttcaagcaa ttctcctgcc tcagcctccc gagtagctgg |
| 53701 | gactacagac acatgccgcc acacctggct gattttttgt tttttagtag agacagggtt |
| 53761 | tcaccgtgtt gcccaggctg gtctcaaact cctgagttca ggcagtccgc ctgccttagc |
| 53821 | cttccaaaat gctgggatta caggcatgag gcaccgcgtc ctgcctctga gttttttttt |
| 53881 | tttttttttt tttactgtct cctagaacat cagccccagt agagcaggga tctttgttct |
| 53941 | gttcaccact gagggtcctc attgggtcct agcacacaca gttgctcaat aaatgttgaa |
| 54001 | taagtgggta aagacagcca cgagcttgca gatatgtgtt caaggtgtgt ccttgcagag |
| 54061 | agcttctcta tacttggcac tggagaggcc tgtcgtgggc aaggacatag atgtggcgac |
| 54121 | ctcagacttg agaactcctg gggcagtagg ggagatggat gtggataatg taaccataag |
| 54181 | ccttcctttc tattttagac tgagtggtca aggaaggctt ccagacaatg gaaattctga |
| 54241 | taggttctaa gagggagacc agcaaggagc tgaaccggag gctgacacag ggtgagagtg |
| 54301 | ggaatgtcta ttttattttt tttttggaga cagggtctca ctctgttgct caggcagcag |
| 54361 | tgcagtggca cgatcgtggc tcactgcagc ttcaacttcc cagactcaag tgatcctccc |
| 54421 | acctcagcct cccaagcagc tgggaatata ggtgcatgcc accacatccg gctaattttt |
| 54481 | gtatttttgg tagaaacggg gtttcaccat gttgcccagg ctggtcttga actcctgggt |
| 54541 | tcaagtgatc ttgctgcctt gggctcccaa agtgcttgga ttacaggtgt gagcctgtga |
| 54601 | gccacatctg gcctatttta ttttttaatt agttttttgt ttttgttttt gttttgagat |
| 54661 | ggagtctctg tctccaaggc tggagtgcag tggcacgatc tcggctcact gtaacctcca |
| 54721 | cctcccaagt agctgggatt acaggcacat gccaccacgc ctggctaatt tttgtatctt |
| 54781 | tagtagagac agggtttccc catgttggcc aggctggtct cgaactcctg acctccggtg |
| 54841 | atccacctgc ctcagtttcc caaagtgctg ggattatagg aatgagccac tctgcctggc |
| 54901 | tgggcatgtg tcttgttttt ttcattctgt agataacaag caattgtcct ccctcagcct |
| 54961 | cccaagtagc tggtactaca ggcgcctgcc actacgcccg gctatttttt gtagttttag |
| 55021 | cagaggtggg gtttcaccat gttaaccagt ctctaactcc tgacctcagg tgatcctcct |
| 55081 | gccttggcct cccaaagtgc tggaattaca ggtgtgagcc accaagccca gcctcaaact |
| 55141 | cctgagttta agtgatcctc acacctcagc ctccctgagt gctgggatta caggtgtgag |
| 55201 | ccaccacacc cggcctgagt cgggggaggt gtctatttta gtctgagtgg tcaaggaagg |
| 55261 | cttctctgaa gagctgatgt tggggccagg cctcctcaag cgattagaag gtgtcagcca |
| 55321 | tggggagatg tggagggagg gtgtttcagg ccaaggaagg gtaagatcaa ataattcagg |
| 55381 | gatctgaggg cagaggaatc tggactccag ttctcccatt cagggctgcc caggagagac |
| 55441 | aaagaggatc tcataagggt gtgtggcttt gtggctcact cacgcccaca gcaaggacca |
| 55501 | tgcccaccct actttttttt ttttccccaa gtctccctct attacccagg ctggagtaca |
| 55561 | gtggtacgat cacggttcac tgcagtcttg acctccaggg ctcaagtgat cctcccacct |
| 55621 | cagtgtcctg agtagctggc actacaggca tgcaccacca cccctggctc attttttgat |
| 55681 | tttttggtag agacggggtc tcactgtgtt acccaggctg gtctcaaact cctgggctca |
| 55741 | agcgatcctc ccacctctgc cttctgaagt gttgggatta caggtgtgag ccaccatgcc |
| 55801 | cagcccgcca ccagtcttga ctctccatcc tccctccctc cctgtgagtg ctggtggcct |
| 55861 | gtgtgtcccg cctgctgaaa gatgcctctg acttggggct tttgacttca ggcccgggag |
| 55921 | acacattttg gctggattag ggagatctta aaagggggta ggggacacag caggggctaa |
| 55981 | ggagagtgac acactgcagg caggggttgg gtgacagatg aaggatccac tggtatatgc |
| 56041 | tgccagtgtg tgccatctac ttgtgtgttt tacgtgtgtc tggtgcatgt gtcctgtgtg |
| 56101 | ggctgtatct gtgtgtgact cagctacgtg tcagcatatc cctgtcgacg tgtgtctctg |
| 56161 | ctgatgtgtc tgtctgcacg cacggctgtc ttgcatgtgt cttttttgag atagagtctc |
| 56221 | gctctgtcac ccaggctgga gtgcagtggc acgatcttgg ctcattgcaa cctcaacctc |
| 56281 | ccaggttcaa gcgattctcc tgcctgagcc tcccaagtag ctcggattac aggcacatgc |
| 56341 | taccacgcct ggctaatttt tgcatattta gtagagacgg ggtttcatca tgttggccag |
| 56401 | gctggtctcg atctcctgac ctcaggtgat ccacctgcat cagcctccca aagtgctggg |
| 56461 | attacagaaa tgagccactg tgcctggcta gacatgtgtc tttttttttc ccttctgtat |
| 56521 | ataacagggt ctcactatgt tgcccaggct ggtctcaaac tcgtggcctc aagcaatcct |
| 56581 | cctgcctcag cctcccaaag tgttgggatt acaggcgtga gccactgcac ccggcttgtg |
| 56641 | tgtgtctttc tgtatctgtt gtgtgtgtct gtgggtagtg gctgtttccc tgcatgggac |
| 56701 | attgtggtaa atgtggctaa ttccctgtgt gggggctgct gcctgtggat aagactgtgt |
| 56761 | ctctgtgcat gcgcacgtgt gtgcacgccc ctcacaaccc caacgagaaa acacctgtcc |
| 56821 | accttcctgg gctggcacag gggcacagga ggcgggatcc caaatcacag gctttttctc |
| 56881 | tcggcatatc tctgtacttt attgtccctg ctgtaacaat gctcatcctt cctgagagcg |
| 56941 | tctcctgagg gggcctcggc caaggctgac tggagaaggg gctggtgacc cctagcaggc |
| 57001 | tctgccacct gaggcctggg tcttcccccg ggatccttga atctggagat ggcagagagg |
| 57061 | aggcaggccg gctctttccc caatcctcct aggagagctg cttctgccca ttctcccact |
| 57121 | ggtgaaacgg aggcagaagc agcagctcag cagggtgaag ctgggtttaa ccttcctgaa |
| 57181 | Yggggtccag ggacactcca catctgccac atagcctctt gggctggaca tttttcctgg |
| 57241 | gcaccagcca gcagctggag cagcgagtgc cgtatttctt gtacctaggg ttgggggaca |
| 57301 | agaaactgcc atttaggatg cagtgggggc ccggaaaccg ccacaaggaa accacttttc |
| 57361 | ccaagaggta ggtgttttgc tttttgcttt ccccacaggc catcctggtt acacgtggac |
| 57421 | tgatttgggg acccccgccc caactccctc ctccattcta aggacctgat cccacaggcg |
| 57481 | ttgcagagag gggtcccatc ttcagcgtct ctccagagcg gggtcctctg ggtccgacag |
| 57541 | gaagcacagc gccggggctc tgaagggtca gaggtcaaag ggcaggggtc agaggccaag |
| 57601 | catgtgagct cgggatgcct gtgcggagtc gggcattttg tgggggtctc agtaaaggcc |
| 57661 | ccacctagct ctggatcagc cctgggagtt gccagctcta agccacagca aagccaggaa |
| 57721 | gggagacaga tggcagcatt ccgcagagga ggaagctggg ggtgggggtg actcagccca |
| 57781 | agtggagggg ggtgctgcga ctcctccctg agggctctaa atggggaagc aagatggaga |
| 57841 | aggggggggc agggagaaag gcagggaaga caggaaattg gcccccaaaa tatttatagc |
| 57901 | tcttgggttt tcaggactca cccagggcct cgctgcctgc tgagtgggcc tcggtgcctc |
| 57961 | ctgggtgggc tgcagggccc ccaacagcat ctgcagggga ttcctgagaa cggctactgc |
| 58021 | agggcaggct gtggggcaga caaggtatta gcactggggg ggatctgtag cttgtcccca |
| 58081 | acagccctcc gaaatgaaga tttagtatca aggtatcagc catcccccga ggaggcaact |
| 58141 | aatatctgaa tggcctggct ttgcctctca ttagtaatat tattattatt attattatta |
| 58201 | tttttgcaga tggagtctcg ctctgttgcc caggctggag tgtagtggtg tcatctcagc |
| 58261 | tcactacaac ctccacctcc cgggttcaag caattcttga gcctcagcct cccaagcagc |
| 58321 | tgggactaca ggcgcgcgac accacgccca gctaattttt gtatttttag tacagacggg |
| 58381 | gtttcaccat gttggccagg ctggtctcga actcctgacc tcaagtgatc cacccacctc |
| 58441 | ggcctcccaa agtgcaggga ttacaggcat gagctaccgt gcccgaccta attattatta |
| 58501 | ttattatttg aaaaatagta agcacaggga cagcctgcca ggttccaatc ccagttctcc |
| 58561 | atgtccttgc tgtgtgagcc tggacacatt atctcctact ctgtgcctca gtttcctcat |
| 58621 | ctgtaaaatg ggcttcccaa tacaacagtt tttttttctt tgaaaatttg atttattgat |
| 58681 | ttttaaaaag agatgggagt ctgggcaata tagggagacc ccgtctctac aaacaaaaaa |
| 58741 | aatagccagg agtggtggta caggcctgca ctcccagcta gttgggaggc tgaggaggga |
| 58801 | ggatggcttg ggcctgggag gtccaggctg cagtgagcca tgattgcgcc actgcactcc |
| 58861 | accctgggtg acagagcaag accctgtctc aaaaacaaac aaacaaacaa aagcaaaaaa |
| 58921 | aagcagccag gcatggtggc ggctcactcc tgtaatccca acactttggg agggcaaggc |
| 58981 | agatggatca cctgaggtca agagatcgag accatcccgg ccaacatggc aaaaccccat |
| 59041 | ctctactaaa aatacaaaaa ttagccaggc gtggtagcag gcacctgtaa tcccagctac |
| 59101 | tccagaggct gaggcaggag aatcgtttga atccgggagg cagaggttgc agtgagccga |
| 59161 | gattgtgtca ttgcactcca gcctgaacga cagagtgcaa ctccatctca aaaaaaaaaa |
| 59221 | aaaatattgt tttggcggca tgattaaaaa agtcataatt ataattttta taataacaat |
| 59281 | aaataggtaa aaattagagc tgggggtcat actatgttgc ccaggctggt cttgaactcc |
| 59341 | tgggctcatg caatcctccc accttggcct cccaaagtgc tgggattaca ggtgtgagcc |
| 59401 | accaggccca gcttcccaaa gctttttttt tttttttttt aaggggatgg agtcttgctc |
| 59461 | tgtcacccag gctggagtgc agtggtgcca tctctgctca gtgcaacctc cacctcctgg |
| 59521 | gttcaagcga ttctcctgcc tcagcctccc aagtagctgg gattacaggt gcccattacc |
| 59581 | attcccagct agtttttttt ttttttttga gactgagtcc cactctgtgg ctcaggctgg |
| 59641 | agtgaggtgg cgctatctct gcttactgaa gacttcacct cctgagttca agcgattctc |
| 59701 | ctgcctcagc ctcctgagca gctgggatta caggcaccca ctacaacgcc cagctaattt |
| 59761 | tttgtatttt tagtagacat ggggtttcac tatgttggcc aggctgatct caaactcctg |
| 59821 | acttcaggtg atctgctcgc cttggcctcc caaagtgatg ggattatagg cgtgagccac |
| 59881 | tgtgcccggc ctccccaggc ttttgaatga gcccatacac ataaaatact gcctgttaac |
| 59941 | ctcttattgt tgtcactacc aacaaatagt agctgttagc attattggga aaaatcaccg |
| 60001 | cagccgcagc tgcagcctaa gcaaggccag gcctgattcc taaagagacc aggtctcaca |
| 60061 | ttgggagtgg ggagccactg agtcaggagc ggcaggactg tatctggcac cagctcaagt |
| 60121 | tgtcaaccag agactgggcc acgtgtaacg tagagcacag gtgagggtcc acaccgacgc |
| 60181 | cagRgagcac ccctacctcc cacactggtg tttgcgttgt aactgggaga aagggcggcc |
| 60241 | tggccccagc cggcccctac ctgtacgtgg ggatgatctg caggctggag tccggcttta |
| 60301 | tctgaaactt cagagtcacc ccctcgaacc cagggtccac tctctcggtg ccccggcagg |
| 60361 | ggttcagctg tttccggggc cttctctggg gtggggccga gggagtcccc gggggctgca |
| 60421 | gacggcggcc cttttggctg atcctggtct gtgtgtcctt ggaatccctg tccagcagca |
| 60481 | ggcggccctg agtccccaga gccatcgggt cccagcaagg ccccaggacY ggggtgtcct |
| 60541 | gggcagggga ctgacccagc ctctccactg tctcttggag gaagcacagg gcggtgaccg |
| 60601 | actcctggca tgcaggccag agggacctgg ggagaagggc agtggggtca cgttttcttg |
| 60661 | ggtgactcct gggtttagcc ggccaggggg ttccaacttg ggccggctct ttgtgtaccc |
| 60721 | ttggacaggc tacacacccc acctgaggtt cagtcatttc taactctggg tggaaggttt |
| 60781 | aagagttgca gtaattgcaa ctcacctcgc ccactgtggg cctcccaggc acgcccagcc |
| 60841 | ctccacatca atcaacccct tacggcaccc gtagatcacc caggcaggga ccgccctagg |
| 60901 | tgaccgaggc aggatatcaa gcctctggct gcaggatcga gaaaaaggtt actttttttc |
| 60961 | tttgtgtttc ttttagagac cgagcctcac tctgtacccc cgcctggagt gcaggggcgt |
| 61021 | gatcaggact cagtgcagcc tagaactcct gggctcgacc gatccttccg cctcagcctc |
| 61081 | ccgagtagct gggacttaca ggcacgcgcc accacgccgc tggcttgcca taatatgatt |
| 61141 | acgattttta tcattttcat tattattgag ttgccctcca taacccctgg atgatccctg |
| 61201 | gggagtgcct acatcagccc cagagacatg gaattgcatg gcctctgatc cctagatgac |
| 61261 | cccaagtgtc tctgggcacc agaacctctt tgtaagtttc agtaactatt ataaaattgc |
| 61321 | cacttctcga taaccccagc aaagagaggt catRacccct tgatcactga gccaggtggt |
| 61381 | gaagtgctag cggggtccgg ggaatggggt ttggccttac gcacctctca ctgattctgc |
| 61441 | agcatcctgg ggtcctcggc ttctcctggg agggggatcc tcccagccgc tccaggttca |
| 61501 | gacagggcgg cgccagaagc tttgctggca ttgaggagtc cgggattggc tcggcctcca |
| 61561 | ttgcgcccca gcccagcccc ctccctaatt tcacccggcc ctgtcccgct gggcccaccc |
| 61621 | gatgaaaccc acctgggagg ggcgggacct gtgtggtggg agcgctcttg gtagaggatg |
| 61681 | cgatgagccc cagctgagag cgaccagcct cggcggcacc tttcctcttt ctggcttttt |
| 61741 | tcaggtcatc cgcgcacccc tgcgtggcaa gggcggcctg gaccccacca aatccctccg |
| 61801 | cagctgccgg ggcggggcct tccacgctag ccctccccct cggaaatggg ggctcccagg |
| 61861 | cctctgcctt ggatccccag cggcatctta gatcccagag ggaaaagaga accgggggcc |
| 61921 | cagcacagca gatgcaggtg tggtttgttt ttgtttttgt tttttttttt tttgagacag |
| 61981 | ggcctcactc tgtcacccag gctggagtgg aatggcctga tcaccgctcc actgcagcct |
| 62041 | aaatcccctg ggctcaagtg atcctcccac ctcagtctcc cgagtagctg ggactacagg |
| 62101 | cacttaccac cactccacgc taatttttac tgtttttata gagacgaggt ctcgccatgt |
| 62161 | tgcccaggat ggtcttaagc tcctggcctc aagtgatcct cccatcttgg cttcccaaag |
| 62221 | tgctaggatt acaggtgtga gccacctgta gaccccagat ctgtccccca aggacactca |
| 62281 | acatgctggg gcctgtgtta tcgatttatt gcagctccaa tatgagtcca ctcctactca |
| 62341 | aaccctgatt ctcaggggcc tggggaaggc caccccacta ggggccctgt ceccaccaga |
| 62401 | gcctggacat gggactctct cccaagcagg ggtgttgtcc ttcacagggg cttccacgtc |
| 62461 | tctcccgggc ctgtccgcac tctgggcagg gctggcacct ggctattccc tcaatctggg |
| 62521 | ccctggggcc atggcaatgt ggaatggtcc aggtgttcat gtcagtgggg cttggggaca |
| 62581 | tggccatcca cgtagaagtt cctggtgatc ttgggMaggg tgaattccgc tccttccagc |
| 62641 | tccggtgtca gcacaatctg gcagcccagc cgcgagttct cctggaggag gggggccatg |
| 62701 | tctagcatgt cgtcttccct agggtggtga cacgggcagt gttagccgag ggcaagctag |
| 62761 | ctgggtgggt ggggggccag aggtSgggga gggaggaagc tgactgagcg cagggggtag |
| 62821 | tggtggggga ggcagctccc attccaggaa ctggaagtgg ggaggatggt gggggctgct |
| 62881 | gaatgctcca gggtgaagct gccagctaga cagggctgac ccactcacct ctcctcggga |
| 62941 | ggaggcagga gatccaggtg gtcttcactc acatacacat ggcaggtgga gcaggccagg |
| 63001 | gaggcttcac aggcccctag gggtgggaag tgaagggggc gcaggtgagt ggcagagtca |
| 63061 | ggaaggggct gctatgcgaa tggcgtagag gagtagacct ctcttccacc acgtgcctca |
| 63121 | cgtctccctc ctgggcctgc agctccactg tgtgtaccag gcactgtgtc atgtcctcaa |
| 63181 | tgtcctcagc tagctgttcc ccagtgtgta gggtttacaa acggacatct gggaggcccc |
| 63241 | atttcccagg gactccctag caggctgaga tgcagaacca ttaaggagca gggacttggc |
| 63301 | tgccaggtag ctgagagggg aaaggccagg caggctcccc gcagtctgtg agcccttgct |
| 63361 | gtgaccctat cactgtgctg ggctaatgtg tccccacctc tccactgctc ttggaggatg |
| 63421 | gaccggctga ctcagcagtc agtgtggtgg gggaaggaat caggcattag gattttgttt |
| 63481 | tttttttttt tgagatggag tcttgttctg ttgcccaggc tggagtgcag tggcacgatc |
| 63541 | tcggctcact gcaagctctg cctcccgggt tcacgccatt ctcctgcctc agcctcccaa |
| 63601 | gtagctggga ctacaggtgc ctgccaccac gcctggctaa tttttttata tttttttagt |
| 63661 | agagctgggg tttcaccatg ttagccagga tggtcttgat ctcctgacct catgatctgc |
| 63721 | ccgcctcagc ttcccaaagt gctgggatta caggcgtaag ccactgcacc cggccaggat |
| 63781 | tttttttttt tttttttgag acagggtctc actctgttgc ccagcctgga gtgccatggc |
| 63841 | tcagtcatag cttactgcct caacctcccg gctcaagcga tcctcccacc ccagcctccc |
| 63901 | gagtagctgg gactacatgt gcgcaccacc acacctggct aatttttttt tttttttttt |
| 63961 | tttgaggtgg agtttcgctc tctttgccca ggctggagtg caatggtatg atctcggctc |
| 64021 | aatgcaacct ctgcctccca ggttcaagtg attctcctgc ctcagcctcc caagtagctg |
| 64081 | ggattacagg tgcccaccat cacgcccagc taattttgta tttttagtag agatggggtt |
| 64141 | ttgccatgct ggccaggctg gtcttgaact cctgacctca ggtgatccac ctatctcggc |
| 64201 | ctccctaagt gctgggatta caggtgtgag ccaccgcacc tggccatatt tttttttttt |
| 64261 | tttttttttt ttgtagagac gaggttcacc atgtggccca ggctggtctc aaactcctaa |
| 64321 | gctcaagcaa tctgcctgcc ttggcttccc aaaatgctgg gactacaggc atatgccact |
| 64381 | gcaccagacc aggaattagg gttgaaagag acagaacctg aagttttctg ctgaccacct |
| 64441 | gcccttggtc acacccccac atcctctgat cacagagacc ggtgcttggg gatcatgtcc |
| 64501 | ctcctggcct aaaactttcc aaagggtttt cacactcaga ataaaatcca aactccttca |
| 64561 | cttagtcttg cagttccccc atccccctca ttcattcctt tgttttcctt tgtaattttt |
| 64621 | ttcttagaga tggagtcccg ctctgttgcc caggctggac tgcagtggcg tgatctcggc |
| 64681 | tcactacaag ctccgcttcc cggattcacg ccattctcct gcctccgcct cccagagcag |
| 64741 | ctgggactac aggcgcctgc caccatgcct ggctaatttt gtttttgtat ttttagtaga |
| 64801 | gacagggttt caccatgtta gccaggatgg tcttgatctc ctgacctcgt gatccgctcg |
| 64861 | cctcagcctc ccaaagtgct gggattacag gcgtgagcca ccacaccttg ccaggccact |
| 64921 | tacctctact agcccggcac agtggctcat gtctgtaatc ccagcacttt gggaggccaa |
| 64981 | ggcaggcaga tcaactgtgg tcaggagttt gagaccaccc tggccaacat ggcgaaaccc |
| 65041 | catctctatt aaaaatacaa aaacttagcc gggcatggtg gcagttgcct gtaatcccag |
| 65101 | ctactcggga ggctaaggca ggagaatcac ttgaaccctg gaggtagagg ttgcagtaag |
| 65161 | ccaagatcat gccattgcag tccagcctgg gtgatagagc gagactctgt ctcagataaa |
| 65221 | taaatgaaca aataaatcta tctcacattc caatccctgt cctagactat tggctgctgg |
| 65281 | attccagaac agaactttag gtaggccttt cataacccct cccaacatat cttccccttt |
| 65341 | aatgataaaa tcaggatccc tgatatattc atcccaaaag caaaccctat atattttctt |
| 65401 | ccagacaacc cttcccaagt tggtcataat tatgtattta cctgtgggat tattgtccct |
| 65461 | attagaccga aatggatgtg agatgacaga ggccttattt gttttgtata ttgctgcctg |
| 65521 | acgcgcagta ggtattcata gaaaggcagc acagattagt ggctacaatg gactggtgag |
| 65581 | tctagtattg tcactcactt gcccttagac caggtctact taacctgggg tttagttgcc |
| 65641 | tcatctataa tagggaataa cagtctctac tactcaagtt gtcatgaaga ttcagtcagt |
| 65701 | gaatatttat taacatggtt aaagacatat atatatatat atatatattt tttttttttt |
| 65761 | tttttttttt tttttttttt gagacagtct cactctgtcg cccaggctgg agtgcagtgg |
| 65821 | cgtgatcttg gctcactgca agctccacct cccgggttca tgccattctc ctgcctcagc |
| 65881 | ctcccgagta gctgggacta caggcgccca ccaccacgcc cacctaattt tttgtatttt |
| 65941 | tattagagac ggggtttcac cattttagcc aggatggtct ctatctcctg acctcgtgat |
| 66001 | ccgcccgcct cggcctccca aagtgctggg attacaggcg tgagccaccg cgcctggcct |
| 66061 | tttttttttg tttgtttgag acagagtccc gctctgtcat gcagcctgga gtgcagtggt |
| 66121 | gccatcttgg ctcactgcaa cctctgcctc ccaagttcaa gtgattcttg tgcctcagcc |
| 66181 | tcccaagtag ctgggattat atgcatgtgc caccacgccc agctaatttt tgtgtttctt |
| 66241 | gtagagacag ggtttcgcca tgttggccag actagtctca aactcctgtc ctcaagtgag |
| 66301 | tcgcctgcct cggcctccca aagtgttggg attacaggca tgagccactg Ygcctggaca |
| 66361 | agaaatttct attattattt ttctctcaac aaattatcaa acatctgtta catcttgaca |
| 66421 | ggcaacagat aagcatgaat aaggacatgg gtcaccaatc tcactggggg acagatgaca |
| 66481 | aagtaggaaa caaaacagcc tggcattgtg gcttgtgcct ataatcccag ctacttggga |
| 66541 | ggctgaggtg ggaggatcac ttgaacccag gagttcaagg ctgcagtgag gtatgattgc |
| 66601 | atcatggcac tccagcattg gcgacacagc aaggctccgt ctcttgaaaa aaaaaaagtg |
| 66661 | agaagtgcta tatatcatat cacactgata agacagagta actagggcat gggtacttca |
| 66721 | gctgggctga ggggaatggg attgttaggg acatgacatt tacactgagg tctgaaggat |
| 66781 | gagaaagagc cagaatgttt gctgggaaag cacttcagac agagggaaca gcaaatgtaa |
| 66841 | aggccccgaa gcaggaatga gcttggttgt ttgaggaacc acaagaaagc cagtgtgggc |
| 66901 | tgggcgcggt ggctcatgcc tgtaatccca gcattttggg aggctgaggc gggtggatca |
| 66961 | cctttcagga gtttgagacc agcctggcca atgtggtgaa accccgtctc tactaaaaat |
| 67021 | acaaaaatta gctgggcttg gtggtgggcg cctgtaatcc cagctagtct ggaggctggg |
| 67081 | gcaggagaaa cgcttgaacc cgggaggtgg aggttgcagt gagctgaggt gcagtaagcc |
| 67141 | attgcactcc agcctgggca acaagagtga aactccatct caaaacaaca acaacaaaaa |
| 67201 | gaaagccaat gtggctagaa tacagggagg aagggggaag agaacacaaa atcctgggag |
| 67261 | ccaggagtcc tagtgatctc taataaatgc ttaacaaata agagcttggc aacagatgag |
| 67321 | gccatggtga ggggtttgga ttttagtcca tatttggtgg gaaaaagacg tgaagagaca |
| 67381 | cacctRattt gtggKttttt tttttttttt ttttggacaa atgtataagg acctccttaa |
| 67441 | ttccctctgc ccggttccta ccttccaggt ccaccccgtg gcgctgggcc aggtgaagaa |
| 67501 | cattgtcccc gactctgcca ctcactggga tccgctggcc tgagcggtct acgaacacca |
| 67561 | cgttcaccct ggggacagat ggaagtgcga atgccgaact ggatgatggg ctcagggccc |
| 67621 | gggtagaatc tagggttagg aagtaggaat tgaggcttga cgcacaggta ctgaataggg |
| 67681 | caaagcagaa gggggacctc gagatgaagc tacagggcaa gatggggacc agaggaattc |
| 67741 | cgtgggatga ggaatggggg acttggcccc ctgcactcac acgtccccgg gccgctccgg |
| 67801 | gccgcccgcg tcctcctctc cMgccgggcg cgagcctgga aaacacggtt cggtgagcgg |
| 67861 | ctgcgccgag ccccgccccg ccggcatctg acggattaac gctgcccgcc ccgggcgccc |
| 67921 | caggtacctg tcgcttgaaa ctttctggtt gtccccagcg ccaccccctc ccccgacccg |
| 67981 | gaagtgcccc caggtctgtt ccaccaggtg cccctggcag cctgcagYag aaccctggca |
| 68041 | ctcacgcctc cccgggccat ggaggcggcc atgacatgca tcacgtgact caccgactga |
| 68101 | gcatgcgccg cgccagggag gcgagggaaa gcccataatc aatggaacat aagcgcagat |
| 68161 | gtttgcttag ggcctgcggt gaccaggtgg gaagagcagg gcggaatcca tctcaggtaa |
| 68221 | acccgcgggg ccatcccaga cctcccactc aagcccactg tttgtcccaa gaaccagcca |
| 68281 | actctgattt ctttaaaacc atttacttac aaactttaat tcagcaaagg tccgtgtggg |
| 68341 | gagactgggg tggggtcggg ggaatagtcc ccttggagtg gatgtggacc cccagagtca |
| 68401 | agggagggaa gctggtggcc cagttggctg ggggcaaggc ccagggtcac ctcaggtcga |
| 68461 | caggtcctgc tggtgggcgg gcccagagtt tatcttcatg gagtgctggt ttctggcact |
| 68521 | gggctggaag gaggccagct ccagggatct ggccgggggt gggcaggcag aattcaagaa |
| 68581 | ttcatcttca acaagcgagt gacagcagag gctccgggag atgggcacaa tgtccgactc |
| 68641 | ccacaKacag acagcagggg actggcagag aaagcccatc tctgcacgga ggcccgggta |
| 68701 | ggagggggtg gtggggccgg ttcgccaaga tgaaggcttt ccccttctac tgtccccagg |
| 68761 | gtggagatcc tgggtagggt ggcccaatcc ctaggccaga gctgtttggt ccatagtcaa |
| 68821 | gctcccagag cttggcatct gtggctctgg ccagcagggc ctggggccca gcttttaagg |
| 68881 | catcagaagg ggagggggct gcggcaggga ccccgggccc cacggctggg gtataggcca |
| 68941 | gatgggcagg caggggcagg agacagccat gcctgcagca aatgtgggaa aaacagctgt |
| 69001 | ttcaaaccgc aaggtgtgga atggtggccc ggacaggccg ggccttgaag gaatcagagc |
| 69061 | tgggggctgt ccggggtggt ttgaaaaata aaacttagaa aaggaaacag aagtcagttg |
| 69121 | tcaaagttaa aaaaaaagga gacagtctct gtatcttcac gggaggtcag ggaaacctcc |
| 69181 | aaggcactcg aaaggccaaa attacaggag caatgaggca ggagggctcc ggagagacgg |
| 69241 | gcacagcgga ggaggagatg gggggaggga gggagagcag gccggggccc ctctctctta |
| 69301 | aggctgcagg gtttcagcgt ggggagcaag ccagagacat aatgaggcct ccagactccc |
| 69361 | ccacacccct tgggctcctg gggctccggc tgattggtca gtaaagtctt tcagagattt |
| 69421 | ttctattacc gaaagagaga aaatggttta aaaaaaacac aaaacaaaac atcagaaaac |
| 69481 | ccaaaagcga tttggtgcag gcccttgagt tatctctggt gccagccact tagaaaatcc |
| 69541 | tcttccgctt caggtaggag tccgcgtagt ggccgccgag gccctgggag tgctggccca |
| 69601 | catagctgcc ttctgggctg ggctcgggcg agggcagcag gtgggcaaag ctgcgtttct |
| 69661 | ggccgcccag tggggtctgg agacagaggg cagggcgggg cgggtcaggg gccgctgggg |
| 69721 | ggccggggct tcccagccct gcatgtcccc accccctgcc cgtaccttca gcaggtggct |
| 69781 | gtgaccatta ggcccggggc tgaggcccag gagcccttct ccggacccca gcggggaaga |
| 69841 | gccgattgcc tgggagaaat ggagaggtgg aacaggtcac tccctggggg ccagaggaag |
| 69901 | cacccacccc gcccccctgc cactgccccc cagccctgag ggaaagcgaa cagtttcagg |
| 69961 | ttcaaatctt gcttctgcta ctttctagct ataagaccta gggccaattg ctccatttta |
| 70021 | tttgagcctc ggttttctca tctgtcagat ggggccagta gcacccacag cctgggctgt |
| 70081 | agagagagga agtgacagaa agcccggaat gctggcagtg ctaggtgctt gatgcagagt |
| 70141 | ggatggagga caataggctg ttgctactcc accctgagca agaccaaccc ctgccaccac |
| 70201 | cccagctttg gcctgggcac cgagggttac agagccccgg tggcaggcac ccccaaatcc |
| 70261 | tagctgtccc agggggcctg tgcttggcca gagaggttcc tcaccttact gaggtggctc |
| 70321 | tgcttgaggc cagcctgcag gccgctggtg aagtaggaag tgggcgagcc tgaatagaag |
| 70381 | tgagacaggg ggcccccgcc actcccaccg ctgctccgtt cgccgaagcc actgggcggg |
| 70441 | ggggacatct gtagaagaag ggccggtgga gtgaagcaga caattgtagt acccagccct |
| 70501 | ttgtatacaa tcttccctcY gcctcccagg ttcaagcgat tctcctgcct cagcctcccg |
| 70561 | agtagctggg attacaggca tgcgccacca tgcccagcta attttttgta tttttagtag |
| 70621 | agacggggtt tctccatgtt ggtcagactg gtctcacact cacgacctca ggtgatccgc |
| 70681 | ccacctcggc ctcccaaagt gctgggatta caggcgtgag ccaccatgcc cggcagttct |
| 70741 | gggctttgca aagactagct ttggctaata ggactgagga gagctggcac gtgggtaccc |
| 70801 | gcctcctctt cctcctccag gaacccaggg atcatcaccg cacgaatggg cacacagaaa |
| 70861 | ctgttccagc ctgtggacgc caaatatgtg aggccacata gctcactgag acccaggtga |
| 70921 | gtgccgggga ccgcccactg ccccatagag tggcaagaag taataMaatg cctggcatgg |
| 70981 | tatggtggct catgcctgtg atcctagcac tttgggaggc caaagtggga ggattgcttg |
| 71041 | agcccaggag tttgaggcca cagtgagcta tcatggagcc actgcactcc agcctgggca |
| 71101 | acacagtgag atcctgtctt aaaaaaaccc acaaagaaca cacaaaatac aaggtctgct |
| 71161 | gttccaggct actaagtcat ggcacagcct gtcatgtagt aaaagctgat tgctacacat |
| 71221 | gccataccag gtggctctta ccttgtgtcg gctgggtccg tgaggcccaa gggctggttc |
| 71281 | ccgtgggtgg gagaagagcc gccgaggtcc catgtcctga atgaaagcgg gagaagcaca |
| 71341 | ttgggttgga gtctgtccca gcctcacccc tggctgaact ccatggcaga gctgtcatca |
| 71401 | gggaagacag tccccaccac tctgggacca ggaagaggca aatttggggc tggatgcagc |
| 71461 | ttggcaggga tggctgctgt gaaggggggt gccccccatg ggcctaagtg tttggagttt |
| 71521 | cccaggcaag ctgggaattc gagctgtgtg gactcttgca gttttcctgt gttggcgtta |
| 71581 | gttcctgttg ttatttgttt gaaacacaga gggggccaaa catcacccag gtgacctgtg |
| 71641 | ggcggccagt ttgcaatttc tttctttttt ttttttaaac ggagttttgc tcttgttgcc |
| 71701 | caggctggag tgtaatggca caatcttggc tcaccacaac ctccgcctcc caggttcaag |
| 71761 | tgattctcct gcctcagcct ccctagtaac tgggattaca ggcatgtcta ccacacctgg |
| 71821 | ctaattttgt atttttagta taaaacataa attatatttt atattatata tgaaatatat |
| 71881 | attttattat atattttata atatataatt tctccatgtt ggtcaggctg gtcttgaact |
| 71941 | cttgacctca ggtgatctgc ccgcctcggc ctcccaaagt gctgggatta taggcatgag |
| 72001 | ccaccgtgcc tggcccagtt tgcaatttct gacctgccaa ggaggttggc atcatagaag |
| 72061 | gaccaaatct ccaggggcac agacaggaat caaaggtggg agagagggat agaaagggca |
| 72121 | agccctgtct ctggggagag acagtgtggc ctaagtcctc ttgggagaga aagacagacg |
| 72181 | caggatgaca gacagactga gacccaagat cctccagggc tcgagaatgg acagacaggc |
| 72241 | aggtggaccg gaagcagggg gtgatgtgca gacagacggg aaactttaag ggcatgaggc |
| 72301 | tgggcgcggt ggctcttgcc tgtaatccca gtactttggg aggctgaggc gggtggctca |
| 72361 | cttgaggtca ggagtttgag accagcctgg acaacacaat gagactccgt ctctaccaca |
| 72421 | aatttaaaaa ttagctgggc atggaggtgc Rtgcctgtgg tcccagctcc tcaggagact |
| 72481 | gaggtgtgag gatcgcttga gcccaagagg ttgaggctgc agtgagctat gatcgcacca |
| 72541 | ctgcactcca gccagggcag cagagggaga ccctgtctct aaaaaaaaaa aaaaaaaaaa |
| 72601 | gcagagacca tatctggcac gttccctgcc gcctccctag cacatggcct ggcatagtca |
| 72661 | atcctagaga aatatcagtt tggagaatga tttggcctta ggggacagag agctgcagcc |
| 72721 | aggcactcac cgaggggtag tcgaagctgt agctgtcaga cagtcctggt tcggggggca |
| 72781 | ggcgggcgct gctgaggggg ctgagcaggc gggacttgag ctggaaggct ttgctgctgc |
| 72841 | tgctgccacc tccaggggct ggggggttag ttggggggcc ctcagctggg cggcggcttc |
| 72901 | tcccggcgcc tccccagccc cgggcctcct tacccgccag gttgctggcc gggagcaggc |
| 72961 | tgtgtaggtt caggtaggga ttcaggggaa tccggtagtc cttggggggc tcccccagca |
| 73021 | gtgagacctg tggcgggaag gcaggattcg agagggcccc cgggagaggg aaccctgcgg |
| 73081 | aacaggaggc tggtgtggtg ccgcgcgcag ggcagggcct taccccaggg ggcgtcggca |
| 73141 | gaggcccact gtctttctgg aggcctctga ggccagagcc tcggagcccc acaggggcKg |
| 73201 | ggggaggagt gagctgggcc gctgggggac ccaagcccag ggcctcccgg tcacccccag |
| 73261 | cagggccaag cacggatggc agcaggggtg gtggcttccc tcgccggggc ggcagctccg |
| 73321 | ggggcaggcc ccctcctagg gagggaagga ggatttcagg ggcccaggct cacaggaccc |
| 73381 | ctctccccag ggccctccag ctcccacctg gaccagggcc caggggtcaa gagacaaatc |
| 73441 | catgctggcc actgagcaga gctcatccct gggccctgag tggagggcac ccaactgatg |
| 73501 | gacaagggcg ctgggaccca gaggttgggt cactcacccg aggccacgta gcagggaagg |
| 73561 | aaggggaagt ggctggggga caccgtgtgg gcagggtctg cgttacctgc aggcagctcc |
| 73621 | ccgaggaggg ggttggctgg ctgggcccca ggctggaggg cgcccagggg tgagtctccc |
| 73681 | aggatgccgg gcttctaggg acagagcaca gacagttgca gatgggggca gggtggccca |
| 73741 | gggaagcaga caggtgtggc ccagagtctt ggcagacaca ccccaactcc agggcacggc |
| 73801 | cgatcctggg cagacaggca cagggttccc cagtgcccgc cacactccaa ctctatcact |
| 73861 | gtcccatcag ccatggtgac cgagggtctc ctgagctcca ggccccagtt ccctggccaa |
| 73921 | tgattgcagc acagtatcaa ctgcagccac atggaatggg acagccacac agtgtttcag |
| 73981 | ccacttttag tcacagaagg ccagacccac aggctcacat attctgtcag ttaccaccag |
| 74041 | acagacacac ctgacttaga atccagggaa ccacaccaga caggacggag catgggtgta |
| 74101 | tgtctatgtg tgtgtgtgtc tgtgtgtgtg tgtgcgtgta tatctgtgtc tttgtttctg |
| 74161 | tgtgcatgag tctgtcttgt gtctatatgt gtgtctgtgt ctatgtgtgt gtctttgtct |
| 74221 | tatgtctttg tgtgtctatg tctctgtgtg tatatttgca tctttgtatg tgtgagtcta |
| 74281 | tatgtatacc tgtgtttcta ggtgtgcgtg tgtgtgtgYg cacacactga ggggatagac |
| 74341 | ctggagtttt ttcccaggca tgtctataga gcttccgagc agagtctatt cacaaactgg |
| 74401 | tgcccagcag cggcgctccc agcccacacc cagtttcagg ctgtaaatgg gcgtgtccag |
| 74461 | gtcccctgac cccaccccag gcaccaagtc caggggcgct ctcagaatgg agggaaagat |
| 74521 | ggcgaaccat catgagcaat tgccagaggg ggatggggat gtgggtggga aaggcagggg |
| 74581 | tttgggggag tcgccctcac cctggttctg cgcccccagg gcacagccag aggtcccccc |
| 74641 | accccaccga tcgcaccagc tgtgttgaaa agagcctgta ggggctgtag agcagtgggt |
| 74701 | gagggggatg cgtgtgttac cttctggccc tgggtctgca gggcgagctg caacagcgcc |
| 74761 | gtggacaggg ctggcccatt gagcagcggc atggctgggg gggcacccag gaggcctgga |
| 74821 | gggagacata ggaggatgtg tgggggtccc tgtgtcctcc ctgccccacc tcacgaaaca |
| 74881 | cagccctgaa cccattgatg gggcaggaaa ctgacactct ggggccgggg ggtgggcagt |
| 74941 | ggacttgccc aaaggaaggg cctagaaggg gcagaggcta ctccagtgaa ggtcagcccc |
| 75001 | ctcttgtcag caccccacct cactgcaggc tgctgtgtgg ccctggtccc ggcccccagt |
| 75061 | tgtggacagc agcagccccc gctatgactc catactcccc ctcggcccta ctcctggggc |
| 75121 | tcctgtcact gcagccaaga tgagcagttt cgggaagtgc cgggggcagc gctgcagccc |
| 75181 | ctgttctgca cagtggggcc cctgtccagc cccaccttac cctgcttccc ccccgcactg |
| 75241 | ccatggagca gggggttgag cagcagctgg agggacgcgg atgggcccag gttgttgagc |
| 75301 | agctgcagga tgttgggctc ggggaggagt cccttccccc gattgagggc ctgcaggaag |
| 75361 | gaacagaagc agctcagagt gccgctgggg ccctgacatc cccatggggc tcccatcccc |
| 75421 | accccgccac ctctgcccgc acaggctcac cgtggcctgg gcagcgatga gagcggccag |
| 75481 | catactgcgg ccggggggcc caggggcgca gaaggagact cgcaggtggc tgccccccag |
| 75541 | ggacaggccg tccgcctgct gctgtgcctc ctccgccatc tcagccgtct catactccag |
| 75601 | caccgcgaag cccttcagct gcccatcctg gccgcacgcc agctgccgga ggaaggcagg |
| 75661 | cagtcatgag catctgggca gcagtgactg caccaccccg ggaagtgaca accgtaacca |
| 75721 | gactcagctg ccccataagg gtgaactcca cgccaggcct ccactgccct gtgcctcatt |
| 75781 | cctgcatcag ctcatctgat tttcccaatg accctgggag gctgcatcat acccatttct |
| 75841 | cagagaaggc aactgaggca cggagaggtc agcgcaccca aggccacaca gctggaggga |
| 75901 | gggcggagct gggagccacc tcaccaacaa agccaaggcc acgggcggat gcggtggctc |
| 75961 | acacctgtaa tcccagcact ttgggaggcc gaggcgggca gataacctga ggtcgggagt |
| 76021 | tcgagaccag cctgaccaac atggagaaac cccgtctcta ctaaaaatac aaaattagcc |
| 76081 | aggcgtggtg gcacatgcct gtattcccag ctacttggga ggctgaggca gaggcaagag |
| 76141 | agtcacttga acctgtgagg cagaggttgc ggtgggccga gatcgcgcca ctgcactcca |
| 76201 | gcctgggcaa caagagcaaa actccatctc aaaaaaaaaa aaaaaaaaga gataatcagc |
| 76261 | aacgggtggg gaaggaaggg ctctcgttcc agacagtggc caagccaggt agcagtgcta |
| 76321 | agggaagtgg ttgggctggg caccggcact tgctgaatgc ccgggcagca aaggtgcagg |
| 76381 | tagcagccct tcacctctgc ccacgccctg tgccaaggtc tgggcacaga tctcccataa |
| 76441 | ccaaacctgt cggcttttgt tttgttttgt tttttttgag acagagtctt gctctgtcac |
| 76501 | cccggagtgc agtgatgtga acttagctta ccgtaacctc cacctcctgg gttcaagtga |
| 76561 | ttctcctgcc tcagcctcct ggtagctggg attacaggtg tgcaccacca cgcccagcta |
| 76621 | atttttgtat ttttagtaga aatgaggttt caccatgtcg gcaaggctgg tcttgaactc |
| 76681 | ctgacctcaa gcgatccgcc tgccttggcc tcccaaagtg ctggattaca ggcgtgagcc |
| 76741 | actgtgcccg gccataaaca cacccatctt agggatgaac agagagagac tcagaggggt |
| 76801 | cacagagtga tcaaggccac acaattccta agtcgaggga ctgatgtgtg aacctcaagc |
| 76861 | tgcttcactg tcaagcccac cctccattca gcYgggtcac ctaacattaa aggtgggctc |
| 76921 | ctcggaggac atcacttcaa cgcctgctac tcatcagatg ctcaacaaat gtttggtgag |
| 76981 | accaggccca gtggctcgaa tctataatcc cagctctttg ggaggcaaag gcaggaggat |
| 77041 | cgtttgagca caggagtttc agaccagcct gggcaacata gggagacccc atcttcacat |
| 77101 | aatttttttt ttttttgagg gagtctcgct ctgttgccca ggctggagtg cggtggcatg |
| 77161 | atcttggctc actgcaacct ccacctccct ggttcaatca attctcctgc ctcagcttcc |
| 77221 | cgagtagctg ggattaaagg cacctaccac cacgcctggc taattttttt tctattttta |
| 77281 | atagagacag ggtttttgtt ttttgttttg ttttttttga gacggagtct cgctctgcca |
| 77341 | cccagactgg aatgcagtag tgggatcttg gctcaccaca acctctgtct cccaggttca |
| 77401 | ggtgattctt ctgcctcagc ctcccaaata gctgggacca caggcacatg ccaccacacc |
| 77461 | cagctaattt ttttttttgt atttttaatg gagatagggt ttcaccatgt tagccaggat |
| 77521 | ggcctcgatc tccagacctc gtgatgcacc cacctcggcc tcccaaagtg ctgggattac |
| 77581 | aggcgtgagc caccgtgcca tgagacaggg ttttaccatg ttggccaggc tggtttcgaa |
| 77641 | ctcctgacct caagtgatct gcccgccgca gcctcccaaa gtgctgggat tacaggcatg |
| 77701 | agccactgtg cccggcctct acataaaatt ttaaaaatca gctgggcatg gtgaYgcatt |
| 77761 | cctgtagttc cccagctaca tgggaggcca aggtaggagg atttcttgaa cccaggaggt |
| 77821 | cgaggccgga gtgtactcct ccagcctggg tgattgagaa cctgtctcaa aaaaaaaaaa |
| 77881 | aattaagttt agtgaatgtt cgagtggagg aatgaatggg cagctgttca caacaacctg |
| 77941 | atcatgaagc actgccagcc ccattttgag atgtggaaac aggctaggag agtacctgta |
| 78001 | gctggtcatg accctgtgac ctttgatctc cacataagaa ggtaaggcca ggccagcgca |
| 78061 | gtggctcaca cctgtaatct cagcacttgg ggaggccgag gcaggtgtat cacctgaagt |
| 78121 | caggagttca agaccagcct ggccaacacg gcgaaacccc atctctatta aaaacacaaa |
| 78181 | aattagctgg gtgtggtgtc aggcgctgtc atcccagcta ctcgggaggc tgaagctgga |
| 78241 | gaatcacttg aacccaggag gcggaggatg cagtgagcca agatcgcgcc cctgcactcc |
| 78301 | agactgggtg acagagcaag actctgtctt aaaaaaatat aaaataaaat aaaagaaagg |
| 78361 | tgaggccatt gtgctaactc atcttctgtc ctgagcccgc acaggcggcc tggtacatag |
| 78421 | caggcctggt acgtagcagg tgtccaagag aaagcagcag aatggatgaa tgataagtaa |
| 78481 | acagagaggg ggttcccgtg gctcatggat actcagtttt tgtttttttt gtttctttga |
| 78541 | gacggagtct cgctctgtcg cccaggctgg agtgcagcgg cacgatctcc actaaccgca |
| 78601 | accgcagtct tctgggttca agcaattctc ctgtctcagc ctcctgagta gctgagatta |
| 78661 | caggcgcgtg gcgccatgcc tggctacctt tttttttttg ttgtattttt agtagagacg |
| 78721 | ggatttctcc atgtttgtca ggctggtctc aaactcctga cctcaggtga tccgtccgtc |
| 78781 | tcggcctcca aagagctggc attacaagcg tgagccactg cgcctggcct gttttttttt |
| 78841 | tttttttttt ttctgttttt gagatgcagt gttgctttgt cacccaggct ggagtacagt |
| 78901 | ggcgtgatct cagctcactg caacctccac ctcccaggta caagcgattc tcctgcctca |
| 78961 | gcctcctgag tagctgggat tacaggcctg caccaccaca cctggctaat tttttttgta |
| 79021 | tttttagtag agacagggtt tcaccatgtt ggccaggctg gtcttgaact cttgacctca |
| 79081 | agtgatccac ctgcctcggc ctctcaaagt gctgggatta catgcatgag ccacctcacc |
| 79141 | cagcctgttt cttgttttaa atatagagat ggtgtcccac tatcttgccc aggctagtct |
| 79201 | tgaactcctg gtctcgagtg atcctcctgc ctctgcctcc caacagacac ctagtttaaa |
| 79261 | tggggcacca ataccccact tacacgagag ggacccactc aagcccacag agctgggggt |
| 79321 | ccgagcccag gactgtctct ctgtttttga gatRagggtc tagctctgtt gctcaggctg |
| 79381 | tagtgtcatg gtgctgtggt gcgatcatgg ctcactgcag cctcggactc ccagaatcag |
| 79441 | gcaatcctcc cacctcagcc tcctgagtag ctgggactac aggcacacca tcatacctat |
| 79501 | ctaatttttg tatagagagg atttcaccat attgcccagg ctggtctcga actcctgggc |
| 79561 | tcgagggatc cgcccgcctc agcctcccaa agtgttaggg ttacaggtgt gagtcactgc |
| 79621 | acctggccag gcctacccct tttaagcctc tgcactggcc tccgctcact ggcccaagct |
| 79681 | ctggagctag gctgcggtgt tctgatccca gctctgccag accctggctg tttaactcta |
| 79741 | ggcaagttac ttgacccctc tgtgccttgg tatcctcacc tgaaaatggg agtgatacct |
| 79801 | gcctctcagg gttgctacag gatgaagcaa ctgaaggtta cgtactcaga gtccacagcg |
| 79861 | agtgctgggg gaatgtcccc tttgggatct ctggggatca agaccttctg ggggctctta |
| 79921 | gagagtgagt ctggcctgtt ctcgccccac tgcacctgtt acagggcgag gcacacacac |
| 79981 | agaagtgcct ggcatgtgtg gcttgaatga acaagggact gttttgccaa cccattgtgc |
| 80041 | aagtattgag tccctgctta tggaggaggg aaactgcaga tcagagagcc agtgactggc |
| 80101 | ccgagctcga gggcggggct gggatctggc aaagcctcag tctctgacct caaggctcaa |
| 80161 | atagactgtg ggctcctctg cagcctcctc aatgcctggt ccaggtctgg gaccccatgg |
| 80221 | gaggtttgac gagggtacca gcgaatgagg aggtgagtgg tgagcaagcc tcgagatcca |
| 80281 | tagttacaag agtggccttg catgcatctg atagagggac agtgaggcct gaggctgcag |
| 80341 | agggattcaa atcccctggc caggtgtggt ggctcacgca tgtaatccca gcactttggg |
| 80401 | aggatcacct gaggccagga gttcaagact atcctggcca acatggcaaa accccatctc |
| 80461 | tactaaaaat ataaaaatta tccaggcatg ggggcggggc gcctataatc ccagctactc |
| 80521 | tggaggttaa ggcaagagaa ttgcttgaac caaagaggcg gaggttgcag tgaactgaga |
| 80581 | ttgtatcact gcactccagc atgggtgaca aagtgagact gtctcaaaaa aaaaaaagaa |
| 80641 | aaggcagatg actccaaaga ctctctcagg tgctccgggc ctggcacctg ctccccaatg |
| 80701 | ctctccacag ggctcacctg gcagaaggtg gggctgtgga cagctgacag cgcccggcac |
| 80761 | agagcgtcca catcgttgaa gccaggtggc aggcggtcca cacagaggca gcgggagtgg |
| 80821 | agaagggcag gcgtcagttg cccggcatcc gtccagtgca cgtagagggt gcgtggtccc |
| 80881 | agcggcttgc ccagcaggtc Ygacttggca cgggcagccg agtccttctt catgtactcR |
| 80941 | gcaaagccat agcccttgga ttggccagtg cgctcactgt agaccaggaa gcagcgctcc |
| 81001 | aggctgccga agggccgcac cagctcctcg aactgctgct gtgtgaggct ggggggcagg |
| 81061 | ttggccacac acagcagggc atccgtgggc tgcagctgca ccgacagttc Rcgctcccgc |
| 81121 | aggcggctct ggtggaaagc attgattgcg gcctcggcct gctccccatt cagcagggtc |
| 81181 | acgaaggctg cggtgggagg agggcagtgc gaggtcagcc gggccctgag ggcctgcccc |
| 81241 | tccaccccgc caccctgcaa accaggtggg acctccaaat gctgggcatc tcaggtgcct |
| 81301 | gctgatctga gcagttgcca gccttggcga ctcacacagg cgagagcgcc tgccattgac |
| 81361 | tctaggctcc acgaagccca ctccctctcc cagccctgcg tccacctgca cccacagcag |
| 81421 | cgctcaccaa ctgtgggcct ggctctgtcc taagaacgct gtgggtcact cgggtgatac |
| 81481 | caagggcagt ggttaagccc atgctcactg gggcccagat ttaagcccca agccccaggt |
| 81541 | ggctttgggg gtatcagttt cctcatctct caaatggata taacttaatc atcacaatca |
| 81601 | ccattttgcc agagaggaaa cgggcccaga gcagcacccc tgtgccccga gtaggggagc |
| 81661 | ctggacttga acccaggcag ccggactcca gaggcccact ctacacactg cccacccctg |
| 81721 | ccacctttcc aggccaccag tgcccctgaa ccctgctgcc acgtgctgcc ccagatttgc |
| 81781 | gatccaccca gcggccgcag gaagctttgt tcaaaacgat cacgccacat ccatcttgtg |
| 81841 | gcttctagct gcagggtgca gtgcagcctg tgcgggctcg ctgacctccc ctcccatctc |
| 81901 | accgctgcca cccggaccac gccaggcaca ctccagaggg gcctttgcag ctgctgtttc |
| 81961 | ttgagcatgg aacactgagc cccacctcct cacctggtta acctggaccc acccaggtag |
| 82021 | aaaccctgtc tctactaaaa atacaaaaat tagccgggca tggtggcaca tgcctgtaat |
| 82081 | cccagctact cgggaggctg aagcagggga atgggctgaa cccaggaggc ggaggttgca |
| 82141 | gcgagccgag ctcgcgccac tgcactccag cctggcgaca gagcaagact ccatctcaaa |
| 82201 | aaaaaaaaaa aaaagaccac acaagcaggg gtgactggct gagtgaggca agaggggtaa |
| 82261 | gaagagaatg aacccacggc caaacgttgt caagaattag ctcaatgcca agcgagtgga |
| 82321 | gtaggaagag aatcagcccg atgcccagtg ttctccaagg agaacatgaa ggctgtccca |
| 82381 | agatgacagg atgacaggca gattggggca acctgccatg ttggcctggg gggcaatact |
| 82441 | gggcctgaag ctcagagcag cagacagtga gccaggccct cccatcttca gggatggtca |
| 82501 | ctccctgccc tggcccRccc catggcccca caaacctgtc cctttgtatt tgtccacaaa |
| 82561 | acagtatttg agctcatagt cactgagcag gtcatgtact tcctgtggag atacaagaca |
| 82621 | aaagacaggg agttactgga gatggaaggg ggcaacccag tgccgcttca tagctgccac |
| 82681 | cagctatgaa ggcaggtcaa ttaccacccc ccattttacc aatgaggaaa ctgaggctcg |
| 82741 | atgcagtaat tttgtcaagg tcattctgct catacctggc agagatggga ttcagaacct |
| 82801 | agctgcagac tgtgctatta cccaggcaac atgctcttag agggtatacc tttagctggc |
| 82861 | tgggcggggt ggcYcacgct tataatccca gcattttggg aggccgaggc gggtgaatca |
| 82921 | cctgaggtca ggagttcgag accagcctgg ccaacatggt gaaaccttgt ctctactaaa |
| 82981 | aatacaaaaa ttagccagga gtggtggcgc acacctgtaa tcctagctac tcgggaggct |
| 83041 | gaggtaggag aactgcttgc acccaggagg cagaggttgc agtgtgccac tgcactccag |
| 83101 | cctgggtgac aaagggagac actgtcaaca acaataacaa caaggccggg cgcggtggct |
| 83161 | cacgcctgta atcccagcac tttgggaggc cgaggcgggt ggatcacgag gtcaggagat |
| 83221 | cgagaccatc ctggctaaca aggtgaaacc ccgtctctac taaaaataca aaaaaattag |
| 83281 | ccgggcgcgg tggcaggcgc ctgtattccc agctactcgg gaggctgagg caggagaatg |
| 83341 | gcgtgaaccc gggaagcaga gcttgcagtg agccgagatt gcgccactgc agtccgcagt |
| 83401 | ccagcctggg cgacagagcg agactccgtc tcaaaaaaaa aaaaaaaaaa aaaaaaaaat |
| 83461 | aacaacaaca aaaaaaaaaa aaaaaaaaga ggccgggctc acgcctgtaa ttccagcact |
| 83521 | ttggaggctg aggcaggcgg gtcacaagat caagagatcg agaccatcct ggccaggaag |
| 83581 | gtgaaacccc atctctacta aaaatacaaa aatcagctgg ctgtggtggc gtgcacctgt |
| 83641 | agtcctagct actcgggaga ctgaggcaag acaattgctt gaacccgagg ggtgaaggtt |
| 83701 | gcagtgagca gacatcaagc cactgcactc tagcctggcg acagagtgag actccgtctc |
| 83761 | aaaaaaaaaa aaaaaaaaaa aaagagtatg cctttaggga agccatttaa cctgcatgaa |
| 83821 | cctccttttg caagattcac tgtttccaac aactctgtaa gtgaagtatt aacaaactca |
| 83881 | tgttgtatat gagaaaactt aggctaggag aagtgaagag atctgctgga ggccatgcag |
| 83941 | ttgggcagcg cagccaccca tgggtacctg actggggagc ccaccttcta gtaagcccca |
| 84001 | cgttgtgtgg gttcacatgc ctcccaattt cctcctgctg ataaagctgc cctcttccaa |
| 84061 | gccagctcat ttatttttct tttttttaga gatagtgtct tgttctgtca cctaggctag |
| 84121 | agtgtagtag cacaatcata gctcactgca gcctcaacct cctaggctca agtgatcctc |
| 84181 | ccacctcagc ctcctgcgta gctgggacta caggcacgca ccaccatgcc tggctaattt |
| 84241 | ttaaaaattt tttgtagaga tgagggtttc actataccgc ccaggctagt ctcgaaccct |
| 84301 | tgggctcaat acagcctctt gcctcagcct ctcaaagtgc tgggattaaa gggatgagcc |
| 84361 | accatgccca gcctctcaag ccagctttga aggcaaagtg ctggcgcctg ctgggaccag |
| 84421 | acacactgtg catcttgcag gagagacaat gtgttcccag ctgagagact gcagacactg |
| 84481 | agaggaagac ccagaaagaa acctgaccat ccttaatgat ccctgtcccg atctgtcccc |
| 84541 | aaattcagcc cctcccaaca tccctggggt tccactagcc acgtgcccac ccggtgtgct |
| 84601 | ggtgggccgg agagcaggga atctcagcag caggaagcga gaacctattt caccgccata |
| 84661 | gggcagggca gtatagatgc catttccctg ggtccaaaga gcattgggaa gcgctgcccc |
| 84721 | atgctggccc catgagaagg gcactcctag caggaagatt agccacgagg ggctccatag |
| 84781 | aacacaggcc tcgcttcctt cctgtaggtc tgtaggctgg tggcagaaga ccccattttc |
| 84841 | ccaaattaat cctgaggttt tgggggctga gacccagggg ctgctgttaa cttccggatt |
| 84901 | tatctctgag agcagtgaat aaacgcgtga tatggagggg cgtactctcc gcagtcctga |
| 84961 | aacttctgga tgtgaggYcc cgccaccctg tggtagagtg ggtggagaaa agcatcatcc |
| 85021 | aagcaggggg caactggtgg tccaatgtac cagcccattc acaattcccc aacaggacca |
| 85081 | aagctgtccg cccccttcca ttccccgccc gcttccatca cttggtgtcg cccaagcctg |
| 85141 | tggtcgcccc tagcaacgcc ctccctcact tcgcagtcgg tttccccttt catcatcgcc |
| 85201 | cccccacgtc ccgctcttgg tctctcccga tcccgcgtgg atccggtgct tgggcgcccc |
| 85261 | cgccaacgac ccccgcgcac ctcagcgttg gtgtcgcccg gttccccccg cgcacgcgca |
| 85321 | ccgtggtatt tcccgccacg ctcctacacc gcccccccca atacctggtt ggtcacgtcc |
| 85381 | cccgggaggc cccggatcag tatcttgcgg cggttacgga actggcgctc ggtgtgttcc |
| 85441 | aggcgtttcc ggatctcttc tggatctaga ggcggcagct cttcttccgg cgcccggcgc |
| 85501 | tccgcggcat cgccggcttc gacttcggcc ccagacttag ggctcagcgg gggccggtga |
| 85561 | gtaacggaca cgtccgccgc catcttggga aacccggcgc cttctgggac cagcgagccg |
| 85621 | gggcggagcg gcatagagcg gcaacgaggg cgcgcccgtc gattggctgg gagaaacccc |
| 85681 | acctccttcc cgcccccctt gccccgttgg ctaagcccca gcccacctct caagagttca |
| 85741 | agctgcgtct gcgcgccaca ggccccgccc ccttccgtcg cagcgacgct actcagtgga |
| 85801 | tgtgcacctg ggtgggagag acttgcagcg cgggtggaat caaaccacag attagggagt |
| 85861 | ttgaaggctt tattggtgcg gaatctgagg gcacagccaa gcccccgcca actttgatcc |
| 85921 | cggatcccag cgtcactcag ctctggacgg ttcttccccc attgcttctg tcggctgcat |
| 85981 | agacgtgagg ggcagatagg tgStctcctc cctaacatgg taactgccgc tccgttggtg |
| 86041 | ctccctgaag acgtacatta aggccagtac gatagtcacc acgcccaggg tcagtaacac |
| 86101 | cgccacgaag acggggacaa agtgggagct cccagctgtg cagagaaagc gctaagtcaa |
| 86161 | tatgcgtccc ttctgtctcc aacccccccg ccccccggct taccggtcca gacccgcagc |
| 86221 | cccgtRttag ctcaccctca atgtccatca ccacgaccag ggtgtatttg cctcgtgagc |
| 86281 | tggacgcttg gcactgataa gtaccattat gtgttacgtt gacgaagaac gggatcccca |
| 86341 | ccggcacctc ccggctggag ccttccttca aacaccgcag ctcggggtac gggttgcccc |
| 86401 | tggcttggca ctgcaggacg tgtctcgttt tatctttcca tttcaagtgc tgggggcatg |
| 86461 | tggctcggtc aattttggga ccatctgtgg aaccaccatg tgtgatcaga cacccaacac |
| 86521 | acccgaggca cagtggtgca gaggagcgtc taatctttcc agggcagggg tggagggatt |
| 86581 | aaaggtcagg gtgaccgact cacacaggac tcgcagctgg acgctactgt tcctgtgcaa |
| 86641 | gaactcgccg tccacctcga gagtggcact gcagaagaag ctgcgtccgt cgtcactctc |
| 86701 | ggtagcattt agctgaagtt gagctggctg ccccggggcc gcggccggaa ctccgtccag |
| 86761 | cgtgacctgg actcgagccc cagccatgca actcacggtc actgtggacc cctcatgggc |
| 86821 | ggtgggctcg ctgaggttca caatgggtcc taggaagcct aaaggcgggg cattgcccag |
| 86881 | gagcttaatg aacaggacct tcctgtgggt caagccgctc cctccgccct cccctttcct |
| 86941 | ctcgggatat ccgggccacg ctttcggccg ttcaagcctc gccctctttc cgcgctgtgt |
| 87001 | ccagcttcgg gcactcaggc ccaacccacg ttgcaactgc tattggggca agccaggccc |
| 87061 | caccttttcg gctagtctcc gccccctctg ccacgccccc agactgctga ggccgcgccc |
| 87121 | ccttcccacg cctcctctta ctaaagaccg tcaagttctc ccgggcctcc cgtctctcgc |
| 87181 | cccctagggt cacgttgcag acgatYtccc gggcaccctc ctgatccgcg cgcgccgtgg |
| 87241 | ctgtggctgt ggccgttagc gtgtccccgt ggttcatgac tgtcgcattc agcatctggt |
| 87301 | cccccagcgc caggtagacc tgggcctctg aggctggaaa aagcccgtct agggtgcagt |
| 87361 | ccaccggcca cgacgtttcc acctccaaga accggggggc cacgaggcgc gggggggtca |
| 87421 | cgggcaggac tggggagaaa ggtgggcata gtacaacccc caggactgtg ccttccccag |
| 87481 | gacaccctca tcccccccag tcaggatatc ttgctgactg ggtcaccctt cttcRcagga |
| 87541 | cacacacaca gggccatgaa aacggccttc ttcaaagatc ccacggctcg ggcctccctt |
| 87601 | ccggggccac cttgcccagt ggccgggggc tttccttccc agaagcctgt gaggtccggg |
| 87661 | gtaccccact ctcaggaacc ccaaggtcag ggcaccgtct accctggctc agctcgtcac |
| 87721 | ccaccgtctg aagccccttc tctcaccaaa ggttcggagc tggcgggggg ctgaggtgtt |
| 87781 | cacgaacagt cccagcccct ggggctgcat gtccagttct gtgcggcatg agaaaggggc |
| 87841 | tccgtggtcg tctctgctgg ccagcacagt ggcagtgacc tccgctggct cctccactgc |
| 87901 | gggctgccgg ctcagctcct cctcccagcg aagcagcacc accgtgaggc tggtccgggg |
| 87961 | cgacccaYcc tccacttggc agcgcagggt gaagttctgg cccaccggct gccaaggagg |
| 88021 | caggggtgcc agctccacac gctccgggag ccctgagaga ggaggggagg atggcactta |
| 88081 | gcgggtcctg caaacccacc cactcacccc agggactggg gaggagacag ggtRgtcctg |
| 88141 | ccgagaactg tgagctttga gttaataaac ttagagggct tagagctggg ccagtcgaag |
| 88201 | cgtttgctat tatcattagc gcagtgatta tcatttcctg tgttgtcaga taccttgcaa |
| 88261 | ggcgctaaac aaaactttct gttctcaaag atggcaMaat aaaaaaaaat gaggatggaa |
| 88321 | gggatgaacg tttatgacta tgatatgaat attaaaaatt cctgtttatg gccagacgtg |
| 88381 | gtggctcacg cctgtaatcc cagagctttg ggaggccggg gtgggtggat caaRaggtca |
| 88441 | ggattattca gttctctcca atcaggttca gacactcagg gctttcctgg ttcaccagcc |
| 88501 | ctgtggcagc ctctcaagat actccggcac agtcacagga gacttgacac tcccaggctg |
| 88561 | ggtgccctcc ccagtacacc tacaaaacgc tgggcctcag gccgggcact gtggctcatg |
| 88621 | cctgtaatcc cagcactttg ggaggccaag gtggacggat cacctgagac caggagttca |
| 88681 | agaccagcct tgccaacatg gtgaaacccc atctctacta aaaatacaaa aattagccag |
| 88741 | gcatggtagc acgtgcctgt aatcccagct actcaggagg ctgaggcaca agaatcgctt |
| 88801 | gaacccagga ggcaaaattt gcagtgagct gagatagtgc cactgcactc cagcctggcg |
| 88861 | acagagagag actctatgtc aaaaaaaaaa aaaaaaaaaa aaaggctggg caaggtgact |
| 88921 | catgcctgta atcccaccac tttgggaggc cgagggaggc ggatcacttg aggtcaggag |
| 88981 | tttgagacca acctggccca tatggcaaaa ccctgtctct actaaaaata caaaaattag |
| 89041 | ccgggcatgg tgtcacacgc ctgtaatccc agctactaag gaggctaaga caggagaatc |
| 89101 | acttgaaccc aggaggcgga ggttgcaatg agctgacatc gcgccattgt actccagcat |
| 89161 | gggggacaat agcaagactg cgtctcaaag aaaagaaaag tcaaaaagta ggccaggcat |
| 89221 | ggtggctcac gcttataatc ccagcacttt gggaggccaa ggcgggcaga tcatttgagg |
| 89281 | ccaggagttt gagaccagcc tgggcaacat ggtgaaatcc tgtccctact aaaaatacaa |
| 89341 | aaattagctg ggcgtgttgg catgcgcctg taatcccagc tactcaggag gctgaggcag |
| 89401 | gagaatcgct tgaacccgga aggcagaggt tgcagtgagc caagattgcg ccactgcact |
| 89461 | ctagcctggg ggacagagtg agactctgtc tcaaaaaaaa aaaaaaagaa aagaaaagaa |
| 89521 | aaaaaaaagt agccaggcct gcaatcccag ctactggaga gactgaagtg ggaggattgc |
| 89581 | ctgagcccag gagtttgaga ccaacctagg caacataggg agatcctgtc tctaaaataa |
| 89641 | aggtataaaa aagtgtaaat gtaaaacctc catttgccta ctgctgactg aaaggggtac |
| 89701 | cccctttttt gcttaagaga caagggtctt gcttttttgc acaggctgga gtgcagtggt |
| 89761 | gcaattatag ctcactacag ccttgaactc ctgggctcaa gcgattctcc caccttggtc |
| 89821 | ccccaagtag ctgggacttc aggcatgtgc caccatgccc agctaatatt ttttatttat |
| 89881 | ttttgtagag acggggtgtc cctatattgc tctgcctggt cttaaatttc cggactcaag |
| 89941 | caatcctcct gccttggcct cccaaagtgt tgggattatt gttggggcca ggcgcagtgg |
| 90001 | ctcacacttg taatcccagc actttgagag gctgatgtgg gcggaacacc ccgtctctac |
| 90061 | taaaaataca aaacttagct gggcattagc tggacctggg aggcagaggt cgcagtgagc |
| 90121 | cgagattgca ccactgcact ccagcctggg ctacagagta agagacgcca tctcaaaaaa |
| 90181 | aaaaaaaagc ttgttggggc cgggcgcagt ggcccatgcc tgtaatccca gcactttggg |
| 90241 | aggctgaggt gggcggatcg cctgaggtca ggagttcaag accagactgg ccaacatggt |
| 90301 | gaaatgccat ctcaactaaa aatacaaaat ttgctgggtg tggtggcgtg catgtgtaat |
| 90361 | ctcagccact cgggaggctg aggcaggaga atcacttgaa cccaggaggc gaaggttgca |
| 90421 | gtgagccgac atcgtgccac tgcactccag cctaggcaaa aagagcgaaa ctctgtctca |
| 90481 | aaaaaaaaaa aaaaatgctt gttggggccc aagttaattg atttcacaac tgctgccttg |
| 90541 | gcatgagatt gagatgcgtc tctatatctc tgtctctgtc tctgtgtctc tgtctctgtc |
| 90601 | tRtctttgta tctcacacac aaatgtccag gtctgagctc tgggtcagaa ctgtggtcca |
| 90661 | ttctttgcaa actgagggtc cccactctcc tgagccattg gccacttgcc cacaccacta |
| 90721 | cccaagacca gtcccacctc cggacacgtY gactcactgt acacggtgat gttagaggag |
| 90781 | cctgttatct gRgagccatt gcagtacact gagcagagga tccgactgtt gccagtcacg |
| 90841 | ttgctgagat tgaaggctgc ccagcccatg ccactggcca ccagctcctt tgatagggac |
| 90901 | gtctccaagg cgattttctc agagctggga caatcagtac tgcagttcac aaacagggac |
| 90961 | cctccagcag agagcacagg gttctggggc tccacccgca aaaggaactc ctgcccctgg |
| 91021 | acaccttcag gaacatgaag aagtcctggt gtttgtttcc ttgtYcccca acccacgcat |
| 91081 | caacaggccc caccatttaa cacctctctc cttgtgccga gacagaaggg ttcctgcctt |
| 91141 | catggtccag Kgggaaaggt agaatccatc agagaccRgg gagaactcag aaggaggcca |
| 91201 | gaagaggctc tgatccagca taggaggagg tgagtcaggg aaggcttcct ggaagcgggg |
| 91261 | accattgcag cccgaaactg aaggctaagt aggagttagc aagtgaaagg gacaggtgat |
| 91321 | cctggcagag ggaagcacat acgcaaaggg caaatttcag gagttcagat ggagcaggaa |
| 91381 | gcatgagggg tgtgtgtgtg tgtgttaggg gagagggatg gcgtacaagc ctatgctggg |
| 91441 | gcctgaccac ctgaaggctg aactaaggaa ccagaacttt ctcccgagga tacagagtca |
| 91501 | gcggccaggt cgcagtgtgg caggatgtga acagcgttgc gttctattcc tctaccctct |
| 91561 | actgatcccc aaaacgcagc cctctccagc cctccccggc ttgactggtc tcacctgggg |
| 91621 | tcagcagaca gcagaccagc agagtccagc aggccctggg ccacaacacg gatggtacca |
| 91681 | tggtRgccat tctgacagag gaaggtgcct tcctgaggtg cccgaagggc aggcagggga |
| 91741 | aaaggcgggg cctcccactg cgacggaagc acagcggtta agattgcaga agtctgggga |
| 91801 | ctgcaccttg cccaggcctg tgggtggaag gggatgctgt ggcccttggg ggccagggtg |
| 91861 | ggggacccag acggggctct gcaaagtggc cagcactgct gagtctcccc cagggaatgg |
| 91921 | gctggtccca gttgcactgc tggcccccat ttgaattcac aggaaatgct aactaaactg |
| 91981 | gtttcttttg ttctcagcac tgggaagcct gggtgggggg gatgaggcat ctccttctgg |
| 92041 | ctgaacttag gtgggtaggg gaatattctg tccccagaga ggaagttaat ggggaaaact |
| 92101 | gtaggcacca ttgtgtagat gttaaggtgg gatttcgagg aaacattaaa aaacaaaaac |
| 92161 | aaaaacagaa acagaagcag agtcttgcta tgttgccccg actggtcttg aactcctggc |
| 92221 | cttaagatgg cctcctctca tcttgacctc ccaaagtgtt gcgattacag gcgtgagcca |
| 92281 | ccacgcctgg ccacctttga agatcttgag gatacctccc tatctttgaa gatcttgggg |
| 92341 | atcccccatc ccctgcacaa agagctaagg taggtgattt ggggacagct gaKtccctga |
| 92401 | gccactgtct atccaggatt ctacttggtt tttgtttgtt tgttttgaga cagagtctca |
| 92461 | ctctgtcacc caggttggag tgcagtggcg ggatctcggc tcactgcagc ctctgcctcc |
| 92521 | cgggttcaaa cgattttcct gcctcagcct cccgagtagc tgggattaca ggcatgtgcc |
| 92581 | accacgcccg gctaattttt |

[0408] Following is an ICAM genomic nucleotide sequence that includes the ICAM SNP “ICAM-AA” (SEQ ID NO:).

CCGTACCCTAGTTCGTTCTCAGCACCCCGAGGATTCGGGCAGATAAGGGG
CGGGCCTTGACCGGAGGGAGGGGTATGGTCAGTATACTACGACCAAATGC
TCCGCCCCCAGGCTTCCCGGCACCACTCCTGACCCTGAGCGAACCCAGCG
TCTCCGAGGGGCAGATGGTGACAGTAACCTGCGCAGCTGGGGCCCAAGCT
CTGGTCACACTGGAGGGAGTTCCAGCCGCGGTCCCGGGGCAGCCCGCCCA
GCTTCAGCTAAATGCCACCGAGAACGACGACAGACGCAGCTTCTTCTGCG
ACGCCACCCTCGATGTGGACGGGGAGACCCTGATCAAGAACAGGAGCGCA
GAGCTTCGTGTCCTATGTGAGTTGGTGATAACCCCTCGCCCCCCACCTTC
TGGTGACTTCCAAGGACCCGCCTGCT [C/T] CCTCACCGTGTCGTGGA
GGCGGAGCCATTTCTTACGTCTAAGCCTCTGTAACCCCAC

[0409] Following is an ICAM genomic nucleotide sequence that includes the ICAM SNP “ICAM- AB” (SEQ ID NO:).

GGGAAGGAGGCTCTGATAGGAGGCAGGATCCTCTTCTGCCCATCAGAGGC
GCGGTGGTCTCCCATCGATCGTTGTGGGCCGGAGCAGGGCATTTGATCAG
TGGCTGGGCCGGCGCTAAGCCCCACTTCACCTTCTGTGCCCTTCAGACCG
GCCAGTGGTGGCCGAACTTGCTGCCTCGCCCCCTGGAGGCGTGCGCCCAG
GAGGAAACTTCACGTTGACCTGCCGCGC [G/A] GAGGCCTGGCCTCCA
GCCCAGATCAGCTGGCGCGCGCCCCCGGGGGCCCTCAACATCGGCCTGTC
GAGCAACAACAGCACACTGAGCGTGGCAGGCGCCATGGGAAGCCACGGCG
GCGAGTACGAGTGCGCAGCCACCAACGCGCACGGGCGCCACGCGCGGCGC
ATCACGGTGCGCGTGGCCGGTAAGTGGCAGCTGGGGAGAGGCGGGGCGAG
GTATCTGAGAGGGGGCGTGACCTGGGTCTTGGGGCGGCCGGCCCCGCCTG
CCTCCCTCTCGGTCCCGG

[0410] Following is a MAPK10 genomic nucleotide sequence (SEQ ID NO: 2).

| >4:87372101-87483050 | |
|---|---|
| 1 | attttcccaa aatactagac agtcatatat aatggaaact gcaaacctcc gaaagtgtgt |
| 61 | ctgcgtgtgg gcaaatagta aaatagcatt gaatacacaa tgtcttcaaa cacagtacac |
| 121 | aagtttgaca gttattctaa ctgctctaaa attcttttta tcagattcac tgctaacatg |
| 181 | catggaaaat atgatgacaa attcgRagat tcctaaaaga gaaaagaagg ctatataata |
| 241 | caatcaatta ttacattgtc ttttttcaca attctgtaat aattgatggt aattcaatag |
| 301 | atatttatct ttatctaact ttatctttaa aactatccca agtttactta ttactgctac |
| 361 | ggttttaaat tgcagcagct gaaatatagt aggacaaatg cataatttgg aataagacta |
| 421 | aatattgcat ttcaccttga tcacatcgtc tctgtgccct gagcaaatag tttaacttct |
| 481 | ctaaccctca attttctcat ctgaaaaaaa aaatgaatcc tctctttcgg actttcaaga |
| 541 | aatttaattt ggaagatata agggaaacat ttgcatctac tacagtgttt ctcaaagtgt |
| 601 | aatgcaccca ggaatcacct ggggattctg attcagaagc tctgcattgg gtgctaaaat |
| 661 | tttcagcttc caggtgatgc cagtgctact attctattat tgctgatgtt atctggaagc |
| 721 | tggtttataa tgcaaaatct catgtcccac ccaatgccta ctgaatttca atcttccttt |
| 781 | taacaggatc tccaggtaat ttttatgaac tttaaaattt gaataacatt gatgtagcag |
| 841 | tagatcttgc ttattgctga tatgcagtcg aaaatattat aagttttgaa tcatcacaag |
| 901 | aaaagtgtgt agaatataaa tgaatataat atgttttttc ctcttcaaaa tctgattttg |
| 961 | aattatattt cccaggtgtc accggaagct aaagagtggc cttgcctcag gtcaggtttc |
| 1021 | tactccctga cagcctctca attagctgct gttgtaatga aattatgcat tgtcaaaagc |
| 1081 | ctttttgcat cattttcttc accaaatctc aagttttaag tattttatat agaaactaca |
| 1141 | taaaatccaa ccctgctctg cccattccag tggctgccag atagctggtt ttctttgtga |
| 1201 | ttttgggctg ttggttttct aggagaggag gagaagatta gagcaagtta aaacgccaca |
| 1261 | gaccttgctg ctcttactga gattcagcca tttttcttaa gtaaacactc tccagattgc |
| 1321 | atcaagccat tagttaattt acagaattcc aaaatagttg attctggaga tttttgctag |
| 1381 | ttgcttatat ggtgaagagg atttttggag gtcttcacta caccattctg gctgatgtcg |
| 1441 | cttaaaatgc cctgaagttt ttgaatggtg aacaaaagtc ttatggattt tcattatctt |
| 1501 | gataYattag agaaaccatg catccacctg attgtattgg gctccattta cagatgccac |
| 1561 | taaaatatct tgatagtttg aggcaattat tagatgagag gtcacagtga cctcctccta |
| 1621 | agaaatattt ctcagaatta aatgtcaaat ttttaataaa cattgtatta tgattaagag |
| 1681 | cccaggtttt taatgaaccc tgggatcaag ccctgggtct ggtccttaac gtgtaacctt |
| 1741 | aatcaagtta cttaaccttt ataatacagt gataataaca gtatgtatgt atagatttat |
| 1801 | ttcaaaattc aattaaatta caaaagcaaa gtgcttgaca cagttcatgg cacaaagtaa |
| 1861 | atgctcaaga tgttttagct tctattgcta ttatcatagt taagaatatg gtttggtact |
| 1921 | gataataata atgaatgttc tcttgaatgt gtttctttaa gagtcacatt gaaatagaaa |
| 1981 | taaataaaaa ctgtctcact catgctactt tatgttctat gcaattctag gcactgtggt |
| 2041 | ggtccagcag ttgatgtcag tgatgattag caaacatgat tgcctctttc ccaaagatgc |
| 2101 | agaactacaa agcaagcccc aagatggagt gagcaacaac aatgaaattc agaagaaagc |
| 2161 | caccatgggg cagttacaga acaaggagaa caataacacc aaggacagcc ctagtaggca |
| 2221 | gtgctcctgg gacaagtctg agtcacccca gagaagcagc atgaacaatg gatcccccac |
| 2281 | agctctatca ggcagcaaaa ccaacagccc aaagaacagt gttcacaagc tagatgtgtc |
| 2341 | tagaagcccc cctctcatgg tcaaaaagaa cccagccttt aataagggta gtgggatagt |
| 2401 | taccaatggg tccttcagca gcagtaatgc agaaggtctt gagaaaaccc aaaccacccc |
| 2461 | caatgggagc ctacaggcca gaaggagctc ttcactgaag gtatctggta ccaaaatggg |
| 2521 | cacgcacagt gtacagaatg gaacggtgcg catgggcatt ttgaacagcg acacactcgg |
| 2581 | gaaccccaca aatgttcgaa acatgagctg gctgccaaat ggctatgtga ccctgaggga |
| 2641 | taacaagcag aaagaacaag ctggagagtt aggccagcac aacagactgt ccacctatga |
| 2701 | taatgtccat caacagttct ccatgatgaa ccttgatgac aagcagagca ttgacagtgc |
| 2761 | tacctggtcc acttcctcct gtgaaatctc cctccctgag aactccaact cctgtcgctc |
| 2821 | ttctaccacc acctgcccag agcaagactt ttttgggggg aactttgagg accctgtttt |
| 2881 | ggatgggccc ccgcaggacg acctttccca ccccagggac tatgaaagca aaagtgacca |
| 2941 | caggagtgtg ggaggtcgaa gtagtcgtgc caccagtagc agtgacaaca gtgagacatt |
| 3001 | tgtgggcaac agcagcagca accacagtgc actgcacagt ttagtttcca gcctgaaaca |
| 3061 | ggaaatgacc aaacagaaga tagagtatga gtccaggata aagaggtaag gaaaatctgg |
| 3121 | aggtcgtaac taccagagag ggctcagtag cctcctactg tgggacagga tcacactgag |
| 3181 | ggtgacatat gctggctcca aagtcaaaga aacacaagtt tgctccatca tttatgagct |
| 3241 | ttgtgactgt gtgcaagtta gcttcatctc tgtgagcttt gattccctaa tgtaaacaat |
| 3301 | ttaaatacta gtagtatcta cctcaaaagc acataagaag tgattgaaca tttccctggt |
| 3361 | acagaatagg ctcaataatg tcatctttga ttattattaa atagatagat ttgcattaga |
| 3421 | gggctggaag gagaggggct gtgaggagat ggacagagca ttaggagcct gttagttttc |
| 3481 | actaacaaga aaaggatgaa actagggtaa aaaaagtaga agtaaataga cctccatgtt |
| 3541 | ttattctttc aatcattgaa tgttgagaga gtgccttcta tctgccaggc tctgttccag |
| 3601 | acgctgagga ttcagatgag ctgagagagg ccataagagc caggtgacat aggggattga |
| 3661 | caggctgatt ttcagccttt gacttttact ctgagataga aatccatgga ggtttttgag |
| 3721 | aagaggggtg acgtgaagta tgttcacatg aataaggaag actgtagcct aaatgaggaa |
| 3781 | aaaagaatat gatttRtaaa gaagcaatta tgctaaaacc taattatatc aatgtgcatc |
| 3841 | ttctcataaa atgatcaaag taggagtagc tcctctagtg ttctcagtcc cagtttcagg |
| 3901 | ctgtgtgatt tggacaaccc ttcctccatg gtgtgctagg atcctcagtY ggttgttaag |
| 3961 | ttggctttaa tttaccttaa tatgtttcct atccattcat caattatcag acaaaaagat |
| 4021 | aacgtacttt cagaagctat ggcaaaataa atattaaaaa atactactta taaatgagat |
| 4081 | tgaaaaatta cttccttgga aagtattttt ttggtaagtt tcactgagtg gaattgtggt |
| 4141 | ttgaattttt ctatataatg gagagtgaca ggagatttaa agaaaaatat agggtcatta |
| 4201 | tcttaaaagg ttactcttct ttctgaatgt agtttttgga accactatgt attggaattc |
| 4261 | tgaattactg ccaatccatg atgataaatt agcatttcac actgggaagc ttatattttg |
| 4321 | aggcaagggg tcacacttta aatgtagtag aaaaagaaaa aagttatcac tatgaatttg |
| 4381 | cagatggata cattcatttc tgaggatgtt gctgatgcat atatgttctg agatctacgg |
| 4441 | tatatttcag agattttgat aaactgatag aacttcccaa tagaggtcat cttaatgggc |
| 4501 | catttcagtg tcacattctt accctcRtga caggccaagg gagagctctg cagtagggtg |
| 4561 | gagggtgggg gaccgctcgt ggcctagcca tgaaattata gaaagttaac tgttctggct |
| 4621 | aaattttgat catttctgtt tagagttatt catttttctt taaattcctt tataacttta |
| 4681 | ccccacaagc attgaaggta gatggatgga tagataggta ggtaggtaaa taggtaggta |
| 4741 | ggtaggtagg tagatgatag atagatagat agatgataga tagatagata gagagataga |
| 4801 | taatagatag atgatagata tagatagata gatagataga tagatagata gatagataga |
| 4861 | taatatttta ctttgtttaa ttatcaataa gatatatgtt taaatcattt ataactttac |
| 4921 | cccacaagta ttgagggtgg atggatggat aggtaggtag gtaaataggt agggaggtag |
| 4981 | gtagacagat agataatatt ttactttaat tatcagtcag tgagatatat ggtttttagt |
| 5041 | tttgaaacat atattctttt tccctctcca aattggtttc taactttttc ttttcttatt |
| 5101 | tttttttatg ttttattttt tgacagagtc tcactctgtt gcccacgctg gagagtgcag |
| 5161 | tgatgcaatc ttggctcact gcaacctctg cctcccaagt tgaagcgatt ctcctgcctc |
| 5221 | agcctcctga gtagcttgga ttacagatgc atgccatcat gactggataa tttttttttt |
| 5281 | tcttgtggag acaggggttt taccatgttg gccaggcagc tcttgagctc ttgacctcaa |
| 5341 | atgatccacc cacctcggcc tcccaaagtg ctggggttac aggcataagc catggcactc |
| 5401 | agctagtttc taacaatttt cttaggaaat attgtattgt ggtcagagaa gttcatctgg |
| 5461 | atgatattaa ttatttggtc tattaaaact attcccttat tactggattg ggattctata |
| 5521 | tatgaccaag agatcaagtc tgttaatcag gctattcaaa gcttctgtat ttcttctcat |
| 5581 | ttttatcagc tatatcaata atttttgaga aagatacttt aaaatttcct atcagtattc |
| 5641 | tgagtttatc agtttctttt tataattttg tcatatttta tattgaacaa tttgaggctc |
| 5701 | tactactagg tgaatagaag tttggagttg ttcatatctc cctgaagaat tgatcctttt |
| 5761 | atcattaatt agtgcctatt tttcattgta ataatgcttt ttacctgaaa ctctattttt |
| 5821 | tctgatatta atattgtcct accatcttcc tttgattagt aacttcctga tatgtctttt |
| 5881 | cctttattta actttcaaac tttgtttgat gatttgatct aacaacttac atctttacaa |
| 5941 | ttctggaata tttttttcat catctttttg tctatttcat cttcccacct tctcaatttt |
| 6001 | ctctttccag aacccttatt aagctatgtt tgaccttgtt aatctatcct ctgtctttgt |
| 6061 | taacttcttt tttccatatt aaatttctat aattatcatt tttgaggcat tctaggtaac |
| 6121 | ttttctcaga cctgttttgt agcttactaa tactctgatg agctaattca attctgatac |
| 6181 | ttccccaggc ccatgattgg agattttgta gtctcttctt cataaaaaca gttaatgttc |
| 6241 | caagctctca gttaaattac ttgtagtttt ctgcctgcct aatactggag gcctcacctt |
| 6301 | ctgtccccat gtgaaaaaga aaaacctaga cccaagctct gtggcctcta tccaagacta |
| 6361 | atatccttcg tgtgcttcta cttattgttc tatatttcgg tttcttcctt ggttctgatg |
| 6421 | gctgaagctg ctgttttatt ttaaccttga tgatgtattt taaaaatata tttcttaaaa |
| 6481 | cttttccagc acttttatat gtttgcattg ggagggattt cttctgtatt caacttagtc |
| 6541 | cttttcattc ctggaagttt cccacaagca cctgatacat acaaatgtgt caatatattg |
| 6601 | ttttgtaagg gttgtccttc tcagtatttt aatttcaatt tcttccaaaa ttttggctct |
| 6661 | aaaatagctt tggaaaacaa agagaatata ttgtagaata attctgagtg gaaaccagca |
| 6721 | tagtaccaac ttttcatgta aaaatgtggt catatgttta aaatagcctt ctaaatgatg |
| 6781 | taggattaca aaatatgaag tattattttt taaaattcta gttgcttaca aagagaagga |
| 6841 | agattaattt ttaagtgttc ttattatctg gatgaaatat caacatgtgg ggatcaaatt |
| 6901 | tttcaaagca gaaacataat tgagatttta atttaaaaac tgttattaaa ataatcagat |
| 6961 | atctgagagc tacacatgca ttaacctttc aaatttcagt ggtatggtaa gtttgaatga |
| 7021 | gtcccatggg acttttgctc agaataggag aaattaaaaa gtcagccgag gccaagatac |
| 7081 | atcttaaata aagatgtaac tttaataccc ctcttttgaa taatatatgt atatgatttg |
| 7141 | gatcttagtg gttatggaga aaacagtctc tgtttttaaa aacgttactg cgaattctac |
| 7201 | aattatccaa aagctataca aaacaactat caatttatag agatataaaa tacctatgcc |
| 7261 | cagagctata ttaataactt gggaagcagt gagaattggg gatggaaagg aatgggcttt |
| 7321 | atttttacaa aatatgagat gcagtgctta tttaacacat gtgatcttta cctctcgtat |
| 7381 | caatgtaagc tcattacttt gggtactctt ttataagatg ggactctata tgctgccaaa |
| 7441 | aaccccattc ttagcagtga acttaaccaa caatgacatt ttcctatcac tatttttcct |
| 7501 | tttatagaag gcaaatgtta ttgccctctt tttttttttt ttttgttaac tatcagactt |
| 7561 | tcctgctgca tttagtgtag tgaacttYac aatttaatgt ccaggaagct ttctgcctcg |
| 7621 | tctgcccggc atgtgttact ggcttatctg tgctggcatt cacttattta ctattaaatg |
| 7681 | acagctgctt ccaagagagg ccttgggacc taatgactaa ggtgacagta aatcatctta |
| 7741 | gcaaacagta aaataataca acaaaattac atcctttaaa tcattgaaag ggctttattc |
| 7801 | caatttccta agcatcataa agagtttaga aaatatttgt atgtctcttg catttcaagt |
| 7861 | gaataaaatc actttatctc ttactcttgc gtccccaccc cccacccccc ccaacatcct |
| 7921 | ttgtagctta gaacagcgaa acttgacttt ggaaacagaa atgatgagcc tccatgatga |
| 7981 | actggatcag gagaggaaaa agttcacaat gatagaaata aaaatgcgaa atgccgagcg |
| 8041 | agcaaaagaa gatgccgaga aaagaaatga catgctacag aaagaaatgg agcagttttt |
| 8101 | ttccacgttt ggagaactga cagtggaacc caggagaacc gagagaggaa acacaatatg |
| 8161 | gattcagtga gcctgctttc gcctgctgtc tctgatggct ctggcaagga ctccagggat |
| 8221 | tctggtggga tatgacttag aaccaggtgg ctggtcacct ggatgtacag aagtctaact |
| 8281 | ggtgaaggaa tatcatttac agacattaaa catccatatc tgcaatgtgt accaaagtta |
| 8341 | tatcatgccc cataatgcta ctgtcaagtg ttacaactgg atatgtgtat atagagtagt |
| 8401 | ttttcaaaag taaactaaaa atgagaagca tatttcaaga attattttat tgcaagtctt |
| 8461 | gtatttaaat gttaaatcaa tWtgttgttg caatttagct tgctttcaag cttcacccct |
| 8521 | tgcacttaac ataagctatt tttggcattg tgttatcatc ggcttatttt atagatcaat |
| 8581 | atttttattt cccttttttg ctgaggaaat gaagataagc aaaaatataa atatatatat |
| 8641 | aaatatatga gttattaaaa tcagaagaat actttgtggc tgtgctgttt gtgccaatag |
| 8701 | actttgtcat gaccaaaaag agaaatgtaa atagttttat aaaatacagt cgaatcacca |
| 8761 | ggaacctttg agctgctttt aaaattcttc ccctggcacc actcagtttt gcttttgcga |
| 8821 | ggcgatttga cataggaact ttgagactcc atgagaaagt ccctttctga ggcccactgt |
| 8881 | ctaccttgcc agatcctcag tgcgtatcgc caatgcagga tgctccttag aaaagaaaaa |
| 8941 | atggtaaaga atggcattta acgattcagg ctttgaatta ctctgtccct ctggaccgaa |
| 9001 | tctctttaac tgctgSaYag ttttagagga attctcctgc tacttaggta ctgggaaaca |
| 9061 | atgcttgcta aaccatgccc acgtgagcac ctgtctccca ctcaaacctc tcccatctcc |
| 9121 | caacaactgc actttagaat accagcagtg aaatggtatt actgtttccc tctgagtgaa |
| 9181 | actgctagag tatatgtcac gtagtgacat ttttttctca ctcaggctat tgccatctgg |
| 9241 | gattctctcc ctactacagc tggcaaagtt ggtttgcagc aagaagatag tgggaggggg |
| 9301 | ccaggctgca ggagaaggag aaaagtttag aagaaacaaa ccattttgct tctaattttg |
| 9361 | acagtatcac tttcctgtta aaacatacaa taattttaaa aggtgaatgc ctaaagttcc |
| 9421 | aattttagca aatatgggaa cctcagcaat gctaattttc tagaaaaacc cagggctctt |
| 9481 | tggagctaga gttttgggag aacagttctt cacaataagg caatggtttt gagaggccag |
| 9541 | gcaaataatc tttctcaccg tagaacaaaa agttacaaaa ggcataatcg gaaatagaga |
| 9601 | ctacatactt gagtttatgg ggtttgtgtt gtttgaaggt tcaatgcttg catgtgttta |
| 9661 | tttattttca agagggaaag tggtctgtac tgctttcatc cttgccactg tcttgctttt |
| 9721 | attttttact ctcccactga gcaagcRtct gtggtcctat ggtatcaacc agtatcttta |
| 9781 | tagcaataat ttctttaatt cccttttctc tctctttcca attatttaac cagttacttc |
| 9841 | cacctggaca tacgatagga aattcaaact caaaatatga aaattgatct taataactct |
| 9901 | cccttcatat cttttcacct atttccagtc cttatcatag ttgataaaaa cctcagactc |
| 9961 | atccagaaag ctatatgatg cactagtaaa aaaaacaaag atattcaaac tgcttgggtt |
| 10021 | caaatggtat acaatttgcc agctgttact gaaccttcta tgcataactt tttttttcct |
| 10081 | ctgtgcaatt ggaataataa aaatactact cccatagagt tgttatgtgg tcttaatgag |
| 10141 | atagcttggg ttaggctgag cacagctgct agtagaatcc aaaaaggggc caggcatggt |
| 10201 | cgctcacgcc tgtaatccca gcactttggg aggccgaggc gggcggatca cgaggtcagg |
| 10261 | agactcagac catcctggct aacacagtga aaccctgtct ctactaaaaa aaaatatata |
| 10321 | tatatatata tacaaaaaat tagccgggtg tggtggtggg cgcctgtagt cccagctact |
| 10381 | cgggaggctg aggcaggaga atggcgtgaa cccgggaggc agagtttgca gtgagccaag |
| 10441 | atcaagccac tgcactccag cagcctgggc gacagagcga gactccgtct aaaaaaaaaa |
| 10501 | aaaaaaaaaa aaaaagactc cataaatgtt aacgcatatt ttctttcttt ctttctttct |
| 10561 | ttttttttgt ggggggacag tctcactgtc tccttctgtc acccagtctg gagtgcagtg |
| 10621 | gcatgatcac ggttcactgc agccttgacc tccctaggtt caggtgatcc tcccacctca |
| 10681 | gcctcccgag tagctgggac tgcaggcata cgccaccatg cccagctaat ttttgtattt |
| 10741 | tcttttgtag agacagggtt tcgccatatt gcccaggctg gtctcaaaca cctgggctga |
| 10801 | agctgtctgc cctcctcagc ctcccaaaag ttatgcaaga tgcatagcaa tgacgggtca |
| 10861 | cttaatttgt ctgggactac aagcgtgagc caccgcgccc agccaactca tatttttctt |
| 10921 | ctctacccac ttcttcactc ataaatttgc tcaccagcta atctattcca ctcatctttg |
| 10981 | cctttttaat ctgctctctt taatcacttt tcccttacct tttgatgaag gcatcctacc |
| 11041 | cagcgcgttt tgttccagca tctctcctgt acttttgtcc tttgcaggct gccttttcga |
| 11101 | aattattcat ctgaccatag cttgatcttg ctcattacat atgatgactg tcacttgccc |
| 11161 | aggacaaagc ccttcacata gtgtaaaagg tcctactgcc agtttcattc ttgtctccta |
| 11221 | ccacttccca ccacacctgc catgccattt catacctcta gaactttcca cttgctattg |
| 11281 | ttgtgtcctt cttgcttgcc ttctttctag ctggcatgct ccaaacatcc tttaagagcc |
| 11341 | aaatcaatgt cagtttcctc atgaagcttc ccagaatctc aaatcagtgt tagttgcttt |
| 11401 | ttgtgccccc attcgcatta tctctttctg tctttcccac atctgattat tttctttatc |
| 11461 | aaataagaag caatttagga gggagagtga tgaagtggaa atagcagaaa attgagagcc |
| 11521 | attcaaacct agatctgcct ctcaacatgc cttatgcaag atacatggca atgccaggta |
| 11581 | acttgacttg tctgatctca tctacaaggt ggagataata actcctacaa agtagggatg |
| 11641 | ttgccgtggt taatggtggt atgtaatgtg cttatcccgg tgcctgtcac tttgctccac |
| 11701 | tgataactct attgataaat ggagcttctt aaggggccaa gattgtatct tcttgctgtt |
| 11761 | aaatccctcc atgccttatg ccaaagagaa tgtcagcaca gtgagtttgc agtaattttt |
| 11821 | gggaatgcaa atatactcaa acacacacac acacacaggg tgttttgtgg cctgtgatat |
| 11881 | ttgagggatg atattatcaa ttttaattgt caatttcagt gatgatggca ctaatcaatg |
| 11941 | gataccatga gcagcatgtt catctgggtt tccgttagtc aaataaaaag cctagacaat |
| 12001 | attaagtaca attaacataa gaataaattg gaaatcaata aggatacaaa gtagttaggt |
| 12061 | agtatcaaga tttcatttgc tacatcctgt atatgcctct ttaaaactat ttaggtaatt |
| 12121 | aaaatgaatc ttaagttata aactcgagaa aggatttgct ttcagatgtg gggcctactg |
| 12181 | tgttagcctc actattcaaa ctagatRtct gggtatcctt tggagaacat ttaaggtaga |
| 12241 | attgcctatg atgtcagctc tactgaaaca tgattttatt atatgtaaca ttatgaaatg |
| 12301 | actaaaatct ccaggtggag tttaagtaat cattcccatt gattctcaag ctgggatatt |
| 12361 | cttcaaaaaa tcattcccag gctgggtagt ttatattatt gatataatta tgacaccttg |
| 12421 | aaaattcagg agagcattaa ataatgtaat gcttgccgca aaccccagtg ttccttacac |
| 12481 | tgcagagctg cactctgatt agagtaccat acgcatgagt tttggaatct acgaccaggg |
| 12541 | ttcaaaccca gctctgccac ctcatagctt tatgaaccta aattatgtaa tatatataag |
| 12601 | cctaaatttg tttttttctg gaagtagagt taatagttcc tcccttatca tatttttatg |
| 12661 | aggaatgtag tacaataggt gaagggatta acatagtgcc tggaacatag taagtgctca |
| 12721 | ctaaatggaa actatcagcc ctcaaattat ttctgttgaa agagtgtttc agcttctaag |
| 12781 | gaacgtagca aggttctgga ctcagggata tgaccagcat taaaagtatc atgatcacca |
| 12841 | gcacaggata taattatatc ttggtctcag agactcttaa gtttatccgt gcccagataa |
| 12901 | tctgccaggg attgatggca aggaaagtaa cccaaaccac tctttctttc tgagataata |
| 12961 | caattacatc catgatctga aaatcatgtc taaacaacta cgtgtaactg tccttcatca |
| 13021 | actctatcca tgtctacacY aaagatgatg ttgggtgtta aaggtattgg ataaaataca |
| 13081 | atgaatgttt ctgagggcta tcatgaataa actgagggct gtggactagg tcctctgggg |
| 13141 | tacataaact tacagttatt gccatgttat atgatgtgct gtggaagtaa ctaaagagac |
| 13201 | cataaaggtg aagctcagga gagcactgca gagccgtgac tttggtgtga gtcctaaaga |
| 13261 | ccagtaggaa gtcatcagac agagctgcag ttttggtaag gggccttcct agcccatgga |
| 13321 | acagcatggc aaatgtgcct tcagggtaga ccctagggag tcttttcaat aaaataaaca |
| 13381 | tgacctacca agttcatgcc atcaagatgg cattgtgcct aacaccttag cagcacgtca |
| 13441 | tgagacctga aaacacactt agtacccacg cggcttctac tctcttattc aRagaaagca |
| 13501 | tccagagctg gaaacatttt gccttgtttg aactcacaaa ctacaggaaa ggagtgctgg |
| 13561 | aactgtggct cccaaaggtc tgtttcatta ttctctttat agtcttctta actgcacaag |
| 13621 | tggggaatga gttgaaagtt agaactgccc agcttaaggg cctcttgctc tgaagtgact |
| 13681 | tggagaacta acagttcccc aggcagctaa aatctactga acctactgta gatctttcag |
| 13741 | taaaaagttt agctgatgaa aagtgtggtt tttaaagcac catttgtggc tcaggtccag |
| 13801 | gKttgaatga tactccttat ttatgaactt ctgtatagct gctgtctgta tggcctcttg |
| 13861 | aaggataagc cacagtgagg ccagcctttt cttaaatagg gaatgagggc aacaggaSaa |
| 13921 | cagtgaattg ttagggggca aaccaaattg gcatcatttt ctttgagcaa aactgtctct |
| 13981 | tacttctggg ggaggccccg agcatcccac ctgttcttgc gaatagagga tgtccatccc |
| 14041 | aactctctct tctccacaca cccattccct gttccctacc ccctcatgat tcactagatt |
| 14101 | aattatgcac cacactgaag tgatccccag ggtcatgcca tcagaccctc atYgctggtt |
| 14161 | acctgttgcc aaaatagtcc aagttcccat gccatttttc cttcatctat ttgcttatcc |
| 14221 | ccatattgcc cagtgtattc tctcatttgc ttctatctcc aatggcctcc ccctgcctag |
| 14281 | gacttttcca ttatcccctc tagatcttac aatgccatca ccctccccta tgtcctcttc |
| 14341 | tctgaatcat ggttgcctcc tgaagacacM atcttccctg cagccctctc aagcctagct |
| 14401 | atcttcctct ctacaacctg cgtatcattg gcctgaaggg gagacatctt gctttgctat |
| 14461 | ttgcagctac tttcagacct ttaatccttc ttcctctcta atgaccttct tacaagcaca |
| 14521 | tgtctcctta tcattgactg aatattctag cacctaaccc actcaccctc cccactcata |
| 14581 | ctccattcac catcttggcc actcagctcc ttgacgactt ttgaaaatct tgttctgccg |
| 14641 | ctgcctgaac atcagccacc acactcatgg ttacactgcg tactgtgtca tgactaatca |
| 14701 | ctggcatcgc caacagttcc atttcaagca tcccacgctg tggtcatcac ttcttctctc |
| 14761 | tctagtcact ccccttagca ccatcactcc aaattggtaa gttttcagcg actatcatcc |
| 14821 | cccatttcat tacttccctc cttgaccagc ttagcttcta tggttccttc tcataattat |
| 14881 | tctcttgccc ccatttccaa atcccattat gtactctccc agcactgtac tactcttttg |
| 14941 | agaattaaaa agaaacaaat tgcaactcta gtaatttttt cttactctta acctgtgcct |
| 15001 | aaaaaaacta aacatgactg gagaacaaaa gaccaccaag ttgacctgtg ttcctttgta |
| 15061 | tttatatKaa tatggctcac atggttttca tcactgtcca gtaacttatt gtcacagttt |
| 15121 | ccaaggtcaa tttcacactt ctcaaacttc cacaaactct tcattgtcta ctgacaacct |
| 15181 | tacttctatc tttactgaga caacaaaaaa aaaaatcaga tgagtatgta cttatgccca |
| 15241 | tcacgtcacc gtattcccaa actacctgcc tctgtgcaca ccacctcact gcctgctgca |
| 15301 | gttactgtcc agggccagcg cctctgccca tgtactggag cctgtccctc cacccttttc |
| 15361 | aagcatgtta ctctatcaaa taaatatccc tttctctttt gcattatcag ttttgctatc |
| 15421 | tctctgttgg ccccaccagc actattaccc atgctatatt agcttttaaa aaaWtctctc |
| 15481 | aatctcacat ttatctccaa cgtttacatc attcttttgc tgcactttgt agaaaaatat |
| 15541 | tttgaatttt ctgtatctat ttctacttcc ttacttccca tgttttcttg aactcactcg |
| 15601 | agttactctt ttcttgctca atactggata gaaactgctc tcattggggt catcgatgac |
| 15661 | cttcaaacag atttagtcca actgtgaatc ttcagttccc attttactca gcctctcaat |
| 15721 | aacaatccgc ccctgcccat tctctcactt ttgaaacacc ttctttactt ggcttccagg |
| 15781 | acagcacact cctggttttc cctctacctc actgaacatt ctggaatacc ctcctgtttt |
| 15841 | ctgaggtctg tatgttggag tgagaggcat ctccatcttt ggttttctct tctttaacta |
| 15901 | cactgtcttt tggtgggctc atacaggctc ttggctttta atactactta taaactgatt |
| 15961 | actctcagat ttctgtttca gctcaccctc ttccttgaac tccagcttat aagacactcc |
| 16021 | tgctactcca cgtggatttt tttttttttt cttttttttt ttgagataga gtctcactct |
| 16081 | gtcacccagg ctggagtgca gtggcttgat atcggctcac tgcaaccccc gcctctcggg |
| 16141 | ttcaaacaat tctcctgcct cagcctgagt agctgggact acaggcacat gccaccacac |
| 16201 | ccagataatt ttttgtattt ttagtaaaga tggggtttcc ccatgttagc caggatagtc |
| 16261 | tcgatctcct gacctcatga tctgcctgcc ttggcctccc aaagttctgg gattacaggc |
| 16321 | gtgagccacc gtgcccggcc tccacttgga tatctaataa acatctccaa ctgatattcc |
| 16381 | aaaaacaaac atgattttct ccccaatgtt tttctaaccc attgttcatc atctcagtca |
| 16441 | actgtaccat catttacttc atggtttagg taaaagaatc tagagccatt tctgatctct |
| 16501 | tgcttttata tcacaatatc aatctatcag caaatcttct cagctctgcc ttcacaatag |
| 16561 | gtccagaatt caaatccttc tcaccatctc cttttcctag tctaagcccc atcatgtctt |
| 16621 | tctggattaa tgttttatcc tacgatggat ttttttgtcc ccattcttat ctttcttcct |
| 16681 | aagagtcctc tttactcagt agccaaagga atccttttaa aaagaaaatt tagcttatat |
| 16741 | catttccttt ttcaaatcta accaccatct tcccatattt agaatcaaat ctcaagatct |
| 16801 | tgccatgctc tgacccctgc ttctctctcc aatttcattt acaatcccat ttactcttgt |
| 16861 | tcattctgct ttatccacaa gactctttgc ccctccttgt ctatataaac aagctctccc |
| 16921 | tccaaagcct gcccctgctt tctcttcaga gtctgaaatg cccttctccg tgtcaatagc |
| 16981 | tcactctcac ttcagtcagg tctctgagca cttatcccct cttctgagag gcttgccctg |
| 17041 | accaccttgt ctaaaatagc atccctttcc caccttactt tttaacctgc tttgtggtct |
| 17101 | tcgtacttac ctctatStga cttctccact agaatgcaga ccatgtgaag gcagatttgc |
| 17161 | tgacttcatc acatcaacta tgtgtaccta gaacagtcct tggatggttg acgtgcttga |
| 17221 | taaataaata tttgttgcat gaatgaatga gtgaatattt agagctctat gtcaaatttc |
| 17281 | tggttcagat gttcagggat gttctcagtt ggacctttta ataaaaaaaa acaataaatg |
| 17341 | accaaattct actttaagtt attttagggt tccaacagtc acccatagac tgaacaaact |
| 17401 | ccgaagattt ggcttcatgt aagaatgtca ctgcaaagaa gcttcagtac ccattgtgat |
| 17461 | atcatttgct aatttggaga ttgtgatgcc aaaagtataa gccccatgct cagtcagcat |
| 17521 | ctaggtccaa tagctctcag aggaaccata catcaaagca aactttctgc aatgcggaaa |
| 17581 | agaacatcca tgcattttta aaatgaattt taaattttaa ataattttta aaagtggttt |
| 17641 | catctcttgt aatggaaaat attcaaaatt ctcatgctga ttcatgaagt atacttatat |
| 17701 | aattagacaa aataagaaca ttgaaagaag cagactcctt gtttcatcgc tttaagcaaa |
| 17761 | taataaaaat ggactcRtgc aagtcacacc actaatttaa atacattttg taaaaagata |
| 17821 | gcaaataaat gaaataaaaa tatttgcttt agttttttta aacaaagatt tattaactct |
| 17881 | gaatttttta ggttaaggac catgcaatat atatctccta caccgaagtg tccaagaaat |
| 17941 | gtttttggag taaattaatg aactgcttta gaatgttgct cagaaattaa gctagaaatt |
| 18001 | cagagcaata ttctcagggc ttgatttaca ccaaatccaa gttcgcaatg tattaacatg |
| 18061 | aaggaatagg ccattgcttt ctgaaaacct tccttttata aaagaaatac tttaatatta |
| 18121 | tgaattctct tggtctgtgt aaaatattat ttgcattata aaaattgatt ttttggtata |
| 18181 | attgttcata ggcaatattt tcaccaggat gggttcacaa gtgttaatgg aaggcgaatt |
| 18241 | atgtgtggga cagtcttcta gggaatatgt gaggggtttt taagatggat aacattttgt |
| 18301 | acctgctttt gagttgcaaa tgatctggac tgttggttaa acatcgcaga caagatcagg |
| 18361 | tgaagaacat tactagaagt tcagtgatta agaaataaag ccacgtaccc cacggagtga |
| 18421 | aatttgaatt ccttaaattc cctcaaatta ttttatgttg gattttacac caggatagga |
| 18481 | atgtctttaa aagtaagaaa tatttgacat aaggtagaaa atttcaaagg agtgtttgac |
| 18541 | ttgttgctgg atgtgtcacc acatttcatg tgtctgagaa atataaattt ctacagcaca |
| 18601 | tttttagtgc cttaaacaga ctacaatgat gtaaatggtt gaacagttga aatttagtct |
| 18661 | ggaactggga cagatgactt gccacataga gtggctccca acataaagtg atctgtgatg |
| 18721 | gcaggacttt cagcgtgttt cactattagc atgtgtcatc caagcatgcc tttcaacatc |
| 18781 | tgtggagaaa agacatgtta caaatacaaa acaccaccat gatgaattgg gaatgtcaaa |
| 18841 | aacctctgcc ttggctgtga tccagtgttg ttattggcaa gtagattcat ccttctaggt |
| 18901 | tggttgctcc ataagtaatc ttcaagaaaa gcaagtccaa cacccttttt tctccttact |
| 18961 | gtgaacttgg tcaaaattac caaatgtttg gtaaccattt atggtatcag gaatgcacca |
| 19021 | ataactcctt ctgactcttt aagagcaatc atcttgtgga atgcaatttc ccttcttatt |
| 19081 | attgtgggta tttttaggta cctatgcttg acctttttta aagagagtaa ggatctgtga |
| 19141 | tttaaactag gatagaagct gttccagaga taacaaaaag ctgttgcttt ctatattcca |
| 19201 | acaggaacta ggtaaaacga taaatgtgat aactcaaaat aatgtgtatg tttatcttcc |
| 19261 | aggctttcta atagttaatt ggttaaataa aacattattt acagaaatag aagagccact |
| 19321 | cctcaactgt tcaaacactg caaagtaaac taatgcaagt gcagtgacct cttcatccag |
| 19381 | ccacaaaatc atatatattt ttaattctcc aaggagtttg agatagtaaa gttggatatc |
| 19441 | atgtagctaa acaaaggctt ttaccttttc tcttggaaaa tagttaaaat gaatagRaat |
| 19501 | ctgataatta atctgggaaa tttaaccctg ctctacttac ctaatgcccc cccaaaagat |
| 19561 | gatctttttt ttcttcattg attttatacc ttaaaaagaa attactgaat tgcagatata |
| 19621 | caactagtat ctacagacag aaatgMaggt cagttttaga agaaaccagt gtcaaatgaa |
| 19681 | aacacagatt tctacatggt cacattcata tcacacactc ttgacccaag gtgagaaagt |
| 19741 | aggtcattcc ttatttctta tttattccct ggcacaatca gaccacacta caagtttctt |
| 19801 | ttaccagttg ccaaaatgaa atcatgacac ccttcagagc tactgtcgtt acatgcaact |
| 19861 | caagacaacg agcagcatca taaccattgt caacaggcaa actccaacaa tgtctgggtt |
| 19921 | tggatttggt tttatgttga gagaagcaga tttcctctga ttttaataat ccataagaaa |
| 19981 | cagaaatcat aatatattga ctccatatta cctaaaaaga gtcaaaagaa gcagaagttc |
| 20041 | tcccccgatt catcctcttg ttccacagac attttgaaaa taaaagaaga caaaatagaa |
| 20101 | aggaaagggt gtgagaaaga acacagaaat gacttgaacg atttcaaatc cttattaagc |
| 20161 | atcactgagg ttgcatttta cccattagac tgactgaatt tagttctcac tgctcagacc |
| 20221 | ttgcaaagaa actggacgta catggttttg ccttccaggg ttgatctaga actgtaaggg |
| 20281 | tgcatgtgaa tgtgggtatg catgtgtgtg tgctttaagt ccattttata aacactgaca |
| 20341 | caagacaatt ctcatcattg gtaatagtct ttggagtcca atcatgcaga aaaacaggca |
| 20401 | ggtgcaagtt aggtctcatt gcaagatgga catggcaagg tgaacagata atcctacata |
| 20461 | aggattggga gatttgtgtc cattagaata tactggccat tggtcccaca taagtaaagt |
| 20521 | tacatataca agattctata tataaacaga ggcccctcac ttcagtttgg ctgaccaaag |
| 20581 | aaacaggtca aagtgagcca ttttcagata gttaaaggac taagtaccaa aagaaataac |
| 20641 | aaaatcttat cctctaatca caaagaaaat agctaaaata actatttaca ttgcaacttt |
| 20701 | tttgttgttt ttacagagag gagtttcctt gcttggctta atgatatctg tggaaaatgt |
| 20761 | tgaactctta taattaaaat gtgtgtgggg gattgtgagt ggggagttgg gttcctcttt |
| 20821 | ggatgcaaag tggctgagat caaaaatttc tagagcaatt ttactcctct ttctgagctg |
| 20881 | tagaagaata catttttcag caaagctggc taataacatg ccttacagag cataatgcac |
| 20941 | ttaagatgtg gcttttcata tgttaagaga ttcaaatcga aatagatttt gtataattta |
| 21001 | ggttttgcaa tgaatattta caattttaaa acaaatcaag tttgcttatt tttttttcct |
| 21061 | tgacaggaca taaaaggttt tacatatttt tatctatttt ttactagttc catttactaa |
| 21121 | ggccaacttt cagttttacc agtcagctgc tatcagtgtc tttagataat atttttctga |
| 21181 | taacagattg aaaaaactat cgagcttctt aaccctcaat taaatagctt actccaattg |
| 21241 | gtgggaactg gccaggctct ggtccaactg ttgggtacat tcctacaaaa ctcagtcatc |
| 21301 | agattcttga agatgaaagg ttattatcag tttttattcc acaagaagaa attccgttgt |
| 21361 | aaggctagtg tattcctatt taaaattgaa cacgctgacc cacaaaacac atataaaaat |
| 21421 | agtaaagaca tattaatagt aaagtggtgg cggttttgcc aaactcttgc agcagtttaa |
| 21481 | ttttccctgc acatgagtac acagccatcc ttcctacaaa atactgcaaa ctattttatt |
| 21541 | aaggatcact gcaaaccaac tgccccaaag gaagcctaac agaaggttag gctcctcaga |
| 21601 | gtgccaactt catgttccaa aatgagcccc aaccccaggt agaaccttca ctttttttca |
| 21661 | ggaatattgt ccaggtgact tgacacttgc ctaccggaaa agttgggatg ttcttgggaa |
| 21721 | ataacaggtg actatttaag aaatatttgg Kgtgtgtgtg tgtgtgtgtg tgtgtgtgtg |
| 21781 | tgtgtgtgtg tgttaagaca gacaagtgaa tgcagaacat attatattct gtgaatttga |
| 21841 | taatatcatc acctcctaga catattatag gaaagcagac ctagtgggca aaggactggg |
| 21901 | gggcttttac agtggtgatt ctctttgttg ttccatcatc tgccttgctt taatcaccta |
| 21961 | ataaaactga tcctgcaaaa attctggggg ccaaatcctt acctctattt gtaaatgata |
| 22021 | cttatattca aggaatttgt tccatttttc tcttgtccat aagggaaatc tggctaaagc |
| 22081 | taaccagctc ccaagagcca tgcacagaag atgtaagact aattgagctt tgggaaggta |
| 22141 | ctaacagcgg gggaggggcc ctgtctagtt cttgcctggt ttacYctgag ggggaaattc |
| 22201 | accacttatg caggtacgag agatagcctg tcaagcactt tgaagatgct ggctggagac |
| 22261 | ttccttctgt cttgtgatgt catcttgcgg ctgatgaaat tccccttgag actctcttta |
| 22321 | aagcagcttc ctgctctccg cacttaatcc catgtggtat aaagtaaggg aggggagaag |
| 22381 | ccacagatat atcaagagaa aagtaccgag aaagaaaatc agtaaagaat tagagataca |
| 22441 | gagaggagaa gtttttaaaa aaaaaaaaaa aaaacaggaa tatgaaagag agggagctca |
| 22501 | agtgactgag gaggcatttt taacaatcag gttatctgca atattaacca gaaaaaaaat |
| 22561 | ggtagcaaaa tagagaaaat gggccatttt tattccaggg gacaagctgc acaaaggaat |
| 22621 | gttcttctat ttattttaaa caaatgactg cgtgtactga atctgactgt gtgaaataat |
| 22681 | ctcagaatgg cagcaccact ggYatggcga tggtgcaggt gggtgcagtt ccctgtggtc |
| 22741 | tctattgctt gaagagagaa agRaagttcc ctattattat atttaaggca gttttcagag |
| 22801 | cactggcatt cttgtttgct ctgttttggg gatattctat ttgccaatca gttcacactc |
| 22861 | atcaaccatc cacttcctgt ctttcacttc ttcaggtgaa atatcaccac tctagtgagc |
| 22921 | accaacatgg tcagagtgca aataactgtg atggatactt cgaagtgaat aagaagggaa |
| 22981 | gcctgattat tgctgagatc accttggtat tgccttgtac ataaccaaga tgtttcacag |
| 23041 | tgcctcctta agtgctcagg aaagcacttt catttaattt aatttaagct aaattctgga |
| 23101 | gattttgcta aacattgaca ttaatgcttc atggctttta agacaaactc atattgctaa |
| 23161 | aactatttgg cagcagtaaa tttatgggca gagttattgc tcttacatct actgcagtac |
| 23221 | aaaactcaga tgatcagccc ttcgattgct catacttatt aaaataaata aataaacatg |
| 23281 | aaacatcagc cacattaagg agtcagggaa actcctgagg aataacaatg tctctggaga |
| 23341 | tgttttcaaa tgctaacctg agactcacac tgtggtttgg gggtttcatt Mttattatta |
| 23401 | ttattttatt tcagaagagg aaagtaatat tatttctcaa aataaaactt tggcagagta |
| 23461 | tgaatcaggg aagcagccca cacatggaaa acacaatcca caatctgaaa gtagtctagg |
| 23521 | caggctcatt tttttgttga aggaattcac atggaggcaa ttctgctcag ttccagagag |
| 23581 | agattcttat catcaaaagc acacacaata accttgcttc accacctgcc actttctcca |
| 23641 | gtggcctctt gttgtgacca gtaattgaga aatgacaaat gggtatagag ccaaatctct |
| 23701 | aaaacaggga caccagtgtc tcctagtatc tgggtaataa cctcctttca gtcttagtcc |
| 23761 | acaccacaca ctaccctcca gtctctccta ctctttactg tcacagaaaa gactctcagc |
| 23821 | ttttattcac acctgccttc Wgaaggccaa accattttgt gcctgaaaac tgttacccac |
| 23881 | tcSccccaca ctttacataa gtatcacata tgttctttct acaaattggt atacaggtgc |
| 23941 | catttaatcc attcaaattt ggaagctaca tcttcaaggg tctgagagag ctcactcccc |
| 24001 | ccatatattc cccctttaca tgttttctta taagacatac agtttaatca attaacaaac |
| 24061 | taaacagctt atatactggc aatatattac agatgggttt atgtcagagt aatagatcac |
| 24121 | atgaaatgga cYatgtggta ccccagtgca ttatgtcttg gtagagccYt gaggacactg |
| 24181 | acagtagcat ctctaagtaa gtagtgctgt atgaatacag acacatgcgg atctgtatct |
| 24241 | acatccatct gactaggcca aggagcaggt agatgcaaga tagagacaca cacatgctgg |
| 24301 | atggggccac tgcacacctt gtcatgccat ttaaaagggc agttacaggt tgccggtttt |
| 24361 | gcagccatta aaattacact ttatggaaaa ggcttctcta attgtgtctg atttgctttc |
| 24421 | tgtagtaagc atcattggaa gaagaccaaa gcaagagcaa ctagaagtta aatatacatt |
| 24481 | tgagcttagc tgcaatacag aaccctgggg aagaagcagg ctgaaagatt tatttaattt |
| 24541 | taggcttgga ttctctccct tgctgttttc ttgatgttgt gtgtctgcat ttgtgtgtgt |
| 24601 | gtgtgtgtct gcgtgtgtgt gtgttccatc acatcatctc ctgaagaacg ctgggtttcg |
| 24661 | caggcaggcg gctagtcacc tgcaacaacc caggggtcct gccgaggctt ccaggctgct |
| 24721 | gtcagtgtca gatgccaggg tctggtcggt ggacatggag gagatgtcat tgacagacga |
| 24781 | ggatggaggg agactctcac tgctgttcac tgctgcacct gtgctaagaa aatgaagacc |
| 24841 | aacatgactc aatctagaac cagacccatc ttaatgccat tcaggattca gggatgggca |
| 24901 | aatacaatag gggatgtcca gtccatcaat catttggcaa gcctttatag agcagctgac |
| 24961 | ataggggagc atatcaaatg gtgacaatca agacatagca ataaaaagtc cttcatcaca |
| 25021 | agttatcaaa tctcactcta tatttgaaat cacctgcaac actttctatt aaaaaacact |
| 25081 | aatatctggt cacattgcct cccctgcccc cactgcactg catatatttt aatataattg |
| 25141 | gccttgggtg aggccaaggt atttgcattt ttatttattt attttttttg agatggagtc |
| 25201 | tcgctctgtc gccaggctgg agtgcagcgg cacaatctcg gctcactgca acctctgcct |
| 25261 | cccaggttca agctattctc ctgcctcagc ctcccgagta gctgggagta caggtgcgca |
| 25321 | ccaccacacc cagctaattt ttgtactttt agtagagatg aggtttcaac atgttggcca |
| 25381 | gaatggtctc gatctcttga cctcatgatc cgcccacctc tgcctcccaa agtgctggga |
| 25441 | ttacaggcgt gagccaccac gccccgcggg catttgcatt ttttaaaagc tcctcagaga |
| 25501 | ctgtattcag ccaagcattg aaagcctctg gcttatgcag gagacaaata agcaaaaccc |
| 25561 | cttaatggag ccatctgagc ctggttgttt ttaatgcagg gagcttttaa aacaaacata |
| 25621 | tgcaagggtc ctatcccaga aatagaagct gaagtgaagt tcagaaatct gaattacttg |
| 25681 | gggaccacat ctctagagaa aggaagatat ataaatacta ttatgtcatc attaatgaca |
| 25741 | ccaaacttaa aatgcatata gaaaagccag taggacataa gtaggactgt tgatgaaagt |
| 25801 | tacaaaaaaa aaaaaaatag gagaagcctt agcacagctt ttgcttatga gctaactctc |
| 25861 | cagcaggctt gcttacctgg gatctccaaa taagaactcc aaattattaa cttagattaa |
| 25921 | cttgaaaaaa ttgtttatct gttatgcggg agtataaggt tgaaaccctg agaagaaacc |
| 25981 | tgcccaYggt aatcactcag taaaggctag ctgagttgcc agtagctttg agatcaacaa |
| 26041 | aagaaagatg aaccaaaggc attgtgcgat aYaattaaac cagagcaccc tggaaacaat |
| 26101 | ccatttactt tttttctttg tatattcttt atacctaagc aatctgagtg gtaacacact |
| 26161 | tgctttgtga aatagctcgc tattaaaaat ctgtagtata gtcccctaat caaataagag |
| 26221 | atgaggaatt ctcactaaaa ttatatctta tttgagcaaa tatagtgtgc aagatctatt |
| 26281 | tggtgaaaaa taataactcc aaagtcagtt ataatagtgt tatcacatag acctaataaa |
| 26341 | tcagaaagac aaaataaaac taaattaagg aagggRagtg gttaacataa tccttgctcc |
| 26401 | tggagtagac atttcttgcc tgtgagaaaa gtgtgatgaa aatgtatcag ttatctagag |
| 26461 | aggacacaaa cacctaaact aagacagatc acctgtatct tccatgtatt tttaagttgt |
| 26521 | atttgttgac tataaatata tggacgtact ctatgggaaa tgtgaaaaaa tataggaaat |
| 26581 | aaagataatg atatgcaccg atcttcaaat aaaYggtaag aactgttaaa cttttcatat |
| 26641 | atttcttccc ggtcattctt tttgcctgga agtttccctg gtcgtgatct tttaatatgt |
| 26701 | atttttttgg gatcttgata tttttaKata cagaaaagct tatgaatttt tcatgttctt |
| 26761 | taaactccta aaaataccca tcctttctaa tcttaaatgt ctctagaaaa ggtttttaaa |
| 26821 | gtcctcYtgt tattgtcttt ctgtaaataa ttactctatc aggacaatgt ataaagttat |
| 26881 | aatattccat aatattccaa ctttgaatgg ctttaattta ttccaacttt acttaattat |
| 26941 | atcccccata gctatggtac agagctggtt catttcccct catgataaga ttttatctcc |
| 27001 | tagcagacag cccttggttc ctttacattg cccaaatgcc ctgctctgtt tttcaccccc |
| 27061 | gattctggat taaattatac caaYatcctt catattcttt cataagttgc taataattta |
| 27121 | gtgtcactat gatggactcc tcagaattct cttccattta tccacactct tattaaaaga |
| 27181 | cagagattaa aactggacac aggactctat tataaaggcc tgatcaattg tgagcctagc |
| 27241 | agagggaaat tgcttttttc ttactatttg tctgctggat gacatatccc tagactatgg |
| 27301 | atgcctttca aattatggtg ctacagctta atttagtttt gacttgaggt atagaatgat |
| 27361 | gctcatatat tttttgtaac agctttatta agatataatc cacatatata attaagaaat |
| 27421 | ttaattttca tgattcagtg ttttttagta tattcacaac attgtgcagc catcaccaca |
| 27481 | atccattttg cagcatttca tcatccctaa agaaaaccct gcactccatt cctcacctac |
| 27541 | cctgtagctc taggcaatga ctcatctact ttttgcctct ataaaattgc ctgttctgaa |
| 27601 | catttcatgt aaatggaagc atatcatatg tgatcattta tgactggcca ctttcatata |
| 27661 | gcagaatgtt tttaaggctt atccatgctg tggcatgtat ctgtatttca tatctttgta |
| 27721 | tggctgcata atattccatt gtatggatac atcacatttt gtttatttat tagttgatag |
| 27781 | gcatttgatg gatatttagg ttgtttcaac tttttggcta ttacaaataa tgctgttatg |
| 27841 | aacattcatg cacgagtttt gtatggacat gtgttcattt ctcttgggta tacacctaga |
| 27901 | agtggaattg ctggggcata gagtaattct agctttaaca cttgaggaac tgacaaactg |
| 27961 | tgtccggaat tggtgggttc ttggtctcac tgacttcaag attgaagccg cggaccctcg |
| 28021 | cggtgagtgt tacagctctt aaggtggcgc gtctggagtc tgtcccttct gatgttcaga |
| 28081 | tgtgttcgga gtttcttcct tctggtgggt tcgtggtctc gctggctcag gagtgaagct |
| 28141 | gcagaccttc acggtgagtg ttacagctct taaggcagcg agtctggagc ttttcgttcc |
| 28201 | tcccagtggg ctcgtggtct cactggggtc aggagtgaag ctgcagacct tcgtggtgag |
| 28261 | tgttacagct cataaaagca gcatggaccc agagtgagca gtagcaacat ctactgcaaa |
| 28321 | gagcaaagaa caaagcttcc acactgtgga aggggaccca agtgggttgc caatgctggc |
| 28381 | tcgggcagcc tgcttttatt ctcttatctg gccccaccca catcctgctg attggtagag |
| 28441 | ccgagtggcc tgttttgaca gggtgctgac tggtgcattt acaatccctg agctagatac |
| 28501 | aaaggttctc cacgtcccca tcagattaga tacagagtat caacacaaag gttctccaag |
| 28561 | gccccaccag agcagctaga tacagagtgt ggattggtgc actcacaaac cttgagctaa |
| 28621 | acacagggtg ctgattggtg tgtttacaaa ccttgagcta gatacacagt gccgattggt |
| 28681 | atatttacaa tccctgagct agacataaag gttttccaag gccccaccag agcagctaga |
| 28741 | tacagagtgt cgattggtgc actcacaaac cctgagctag acacagagtg ctgattggta |
| 28801 | tgtttacaat ccctgagcta gacataaagg ttctccaagg ccccaccaga gcagctaaat |
| 28861 | acagagtgtc gattggtgca ctcacaaacc ttgagctaaa cacagggtgc tgactggtgt |
| 28921 | atttacaatc cctgagctag acataaagac tctccacgtc ctcaccagac tcaggagccc |
| 28981 | agctggcttc acctagtgga tcccgtacca gggctgcagg tggagctgcc tgccagtcct |
| 29041 | gcgctgtgcg ctcgcattcc tcagcccttg ggtggtcgct gggactgggc gccatggagc |
| 29101 | agggggtggt gctcgtcggg gaggctcggg ctgcacagga gcccatggag tgggtgggag |
| 29161 | gctcaggcat ggcgggctgc aggtcctgag ccttgccccg caggaaggca gctaaggccc |
| 29221 | ggcgagaaat cgagcacagc gccggtgggc cggcactgct gggggaccca gtacaccttc |
| 29281 | cgcagccact ggcccgggtg ctaagtccct cactgcccgg ggccagcagg gctggctggc |
| 29341 | tgtcccgagt gcgggggccc gccaagccca cgcctacctg caactccagc tggcccgcaa |
| 29401 | gcgccgcacg cggcccgggt tcccgctcgt gcctctccct ccacacctcc ctgcaagctg |
| 29461 | agggagtggg ctccagcctt ggccagccca gaaaggggct cccacagtgc agtggggggc |
| 29521 | tgaaaggctc ctcaaatgcc gccaaagtag gagcccaggc aggggaggtg ccgagagcaa |
| 29581 | gcgagggctc tgaggactgc cagcacgctc tcacctctca aaactgtttt ctaaagtggg |
| 29641 | tgcaccattt tacattacta ccagcagtat atgaggattc caatttctct acatcctcac |
| 29701 | caacacttat tatctgtctt tttatctagc catcctagtg tgcatgaaat ggtatctcat |
| 29761 | tgtggtttga tttgcatttg cctgatagct aataatgttg agtatatttt ttcatgtgct |
| 29821 | tgtcagccat tagtatatct tctttggaga aagtttactc agctcctttg gccatttttt |
| 29881 | aattgcttta ttttcttttt attattgagt tgtaagctct ttagctcttt cttcctttct |
| 29941 | ttcttgcttt ctttcttctt tatttctttt tttaaggaca gggtctcagt cgcccagcct |
| 30001 | gtagcacagt ggcatagtca tgtttcactg tatcctctaa ctccagggct caggcaattc |
| 30061 | tcctgcccca gcctcccaag tagctaggac tacaggcaca taccaccaca cctggctaat |
| 30121 | taaaaaaaag attttttgta gagacaggag cttgccatgt tgcccaagct ggtctcaaac |
| 30181 | tcctggcctc aagtgatctt ccgatttctg cctcccaaaa tgctgggtct acaggcatga |
| 30241 | gccactgtga caggcctgta agagctcttt atataatctg ggtacaagtt acttaatgag |
| 30301 | atatgtattt tcaaatgttt ttcctctatg ctatggttta tcttttcatt ttcttgaagg |
| 30361 | tgtcttttga agcacacata tttttaattt ttatgaaata gcatttatct gttgtttctt |
| 30421 | ttatcacttg tgttttagtg tcatatctaa taaaccattt tctaatccaa gattataaaa |
| 30481 | acttactcct atgtttttgc ctaagagttt tataatgtta gaccttatac ttaagtctat |
| 30541 | gattcatttt tagttcattt ttgtatatga tatgaggcag gggcccacct tcattctttt |
| 30601 | gcatgtatat atccaatcat cccagcacca tatattgaaa aggctattct ttgtccatgt |
| 30661 | cttacatcct tatcagaaat caattgatca taaatgtagg tatttattcc tggactctca |
| 30721 | atttgattcc gttgatctat ttgtgtatct tcatgcaaat agcactctgt cttgaatatt |
| 30781 | gtagctttgt agtaagtttt gaaatcagaa catgtaaatt tcccagctgt gttgtttttc |
| 30841 | aaggttattt tggatattct gtatcctttg catttccaca caaattttaa gatggggctt |
| 30901 | gtcaatttct gcaaaaaaga cagctatgat tttgataagt attggcttaa tctgtacatc |
| 30961 | aattYgggga gtatctgtca tttcttgaca atattaaata ttctaatcca tgagcaatga |
| 31021 | aatgtttttc cagttattag atcctcttta atttctttca acaatgtttc gtagttttca |
| 31081 | gagtacaaaa cttgtacttc ttttgctaac tttattccta aatatgtatt tcttgatgct |
| 31141 | attctaaatg gaattgtttt atgttcattg ctaatgtgta gaaatacaat tatactgagg |
| 31201 | acttatttga ataagaagtt tcagtgtcag tggattggat gttaaaaaca gatcaaatga |
| 31261 | atatatatat atatatatat atatatatat atatatataa aatgaatgtt gtaattaact |
| 31321 | agaaagccag tggaaccagg cgattatgat agcatgcttt atttatgaga aaataaccag |
| 31381 | ttttaaaaat aactggtttt atgagaaaat aaccagtttt aaaactttaa aaagttttaa |
| 31441 | aataaaattg tggcataata caaaccaaaa agtattttta agtctttaat aataatcttg |
| 31501 | gtcttctctt gagataggct ttttccccta tcctggctgg agttgattat gtagacacat |
| 31561 | tcttattgtc acaattaaag ttgagtaatg attcaaataa gggtgagata agtcttagct |
| 31621 | gaaataaggc tcccttatag taaaacaatt tgatgtttac aaataaacac aaacccacaa |
| 31681 | caatggcagc tagagaaatt aaacaaagag cattgaagaa atttctccaa aacacaaatt |
| 31741 | tatatctaca aataatattg aatgtatgta acaaaagcca aagtagcttt taataagctc |
| 31801 | ttcataaaca ggatcgtgct gcaggctatg cttataaaac acacagcact cctactgcac |
| 31861 | ttattttcaa aatcagcata ttttcagcac acttctggaa tattccgagt gttatgccat |
| 31921 | accagtcagc cccttattat atgtagtttt gttatggatt acctcaagca tatatttccc |
| 31981 | ctgcttcttt ttactgcttt cattatactt catttctcct gtcttccaca atgtctactg |
| 32041 | ctgagtagta gcacagagta agtattcgag ttaacaaaac agtattgagt atcttatgtg |
| 32101 | tactcttcta gataggttct gtgaggaaaa gcaagttcct tcctgctttc caactagtga |
| 32161 | aactgttaag ctatttttgg ccaaaggaaa tcactttgtt gcagttgtct ttcttctcct |
| 32221 | tttgttcatc agcagcttct ctctaattcc tatcctctgt gttggaatgg tcctgccctc |
| 32281 | tagtttatca atgttgaatg caaatataat tagtgttcaa ctactcaaag ttcaaaatct |
| 32341 | atcaaagtct ttatcagctg tatttctagg gatccataga ctattgcttc tgattttata |
| 32401 | tggcacaaat tcattaagag aagtcttcag tgcttYcttt gtaaaagttc ccatgacatc |
| 32461 | tgcttgtttc atgggaatgg ttccttgcta tccagtgtga tggtgggaga gaaccgtgca |
| 32521 | ctgtctatgg tgtcctggag ctggctttta gtggcttctt agaacgaatt attagcatct |
| 32581 | ctttccaact ctgcatccat tgatgttaca ttgttgctta aaattggtca cagtgagaat |
| 32641 | atttatacca caggaattgt taagtgctac tagtcaattc tttttttaaa tatagttgtt |
| 32701 | aaatgttaac cagtccacca ctattagatg aaaactattt gcttctgtat gactccctct |
| 32761 | attgcgctat aataaatgcc tccttgcctg cagccacttc tgctggatga tccattcaag |
| 32821 | Wctattttca tgtaggcaat aaacaggagt tctaaaccat aaacccaaac acaaacgtaa |
| 32881 | gggacaagac atgggccttg gctttaagtt gttaaattac tgccaagcag tttgcgaaaa |
| 32941 | tctcttaaac agaattgaac tgaattgaat atgatcatWg tgttcagttg tccagtcaat |
| 33001 | gtgagaaata tctcttcttt ctatattatt taagagaaaa cagtagagat acacattttc |
| 33061 | aaaaatgttt tgccatcaat aaagcattac aaatttttgt ctataaaaat ggcattaaaa |
| 33121 | ggaactgaaa atgtcaatag ggttgcaaat gaggaatatt agctaccttc aactttacct |
| 33181 | aaaaaatcag atttcataga aagaagtaac atatgctaaa gaaaatttct cagctacaag |
| 33241 | ttattcaacc aaaaaacatt gttatggggg aaaatgttgt tctgcttttt ttaaaggcaa |
| 33301 | tgattttcct gataaccccc aatcccaaca acaacaaaaa aatatggtag acacagaatt |
| 33361 | agaaaaagca caagaatgaa aaaatagtgt cttttttatc tacatgatct tgagccacaa |
| 33421 | tttgtctggg cctgagattt tttaataaaa agtaaataaa attaatggac tatattagtg |
| 33481 | accctaagac atattcccat ggtggggaat gtggtcctca ctggggagag aatggttgca |
| 33541 | tattaaaatc acccagaagc tttatctttg aYttagagat tttgaaaaat ctctgcccat |
| 33601 | cctgttgttc agcatcctta tcttagtgag tcactgttag ttttgggagc tttacttctc |
| 33661 | aggtggaaga gggctggtga acaaactcag aattggtgaa tcagatgctc tcctgtattt |
| 33721 | tttctagttc taacgtacta taacaaatgc ttttagaaga aaattaattt caattcatgg |
| 33781 | actgctagtc cctcagcaat tgttacagat caattcagga agcaagcagc tatgccatcc |
| 33841 | ttgaaaataa attactatgc aagtgaaatc agatagcaga agggaataca attatttatt |
| 33901 | tggaaatgta tctgaagttt agatttatct cttattgaca tacaacaatt tcatcaataa |
| 33961 | atttcaaacc tataaattat tctgcaaatg cacatttaac ttcctattta cattttaaaa |
| 34021 | gcatcgcata acatgggttt cgtattagaa gtacttggcc cctgagatac tgcattaact |
| 34081 | tactcccttg ctgcagaatt cccagtattg ccataactga atactaacag agtgtgtgtt |
| 34141 | ataaaaatac cacagctatt ttcaaaataa aatatgctac gtgaacatta atgaaaaaaa |
| 34201 | gctgaatata atgaacaatg caaaaaagct gacttttcaa actttttttt agaattgctt |
| 34261 | tttctttcca gcatagttta ttatacacac aaaaacgcat acacacagtg gtgcgccaat |
| 34321 | aaaaatttaa caattggctc tgcagggggc aacaaaaacg ccctgatttg tagggtctgc |
| 34381 | caatttccat gttgtaaatc cttcgtgcct gatttcacgt tgccaacaca ccaacaataa |
| 34441 | atgcatagtt gggaagagag gtacagagtt ggccgtcatg agctggtaga gtcagcgcca |
| 34501 | gcacatggct gccctagagc ctctccatca tgcacataaa tatgtcatac agaaatgcat |
| 34561 | cccataatgt gtagcataca tatgatttct cacgaaagag aaagtcatac tacatgactt |
| 34621 | ataactaagt catgaatatt tttcctagat ttaatccaca atcattttaa ctataaattg |
| 34681 | gttaagccag tcaactatag tttagggcat atgtattaca tagataattt ttaattgtta |
| 34741 | aggtagttgg aatggttaaa aagtggctta gccttctcac tcaggtagag cctaagttgc |
| 34801 | atattttaga attaatcatt aacacactaa gcaggcctgc aaaacatcca tgaatatata |
| 34861 | tttcccaaaa tgaataaatc aaacacctga aagctgcaaa cctttatgtg aagcatgaaa |
| 34921 | aaatgccaat agcaagaatt tatatacttt atgcttggcc tgtttatctt catggagatt |
| 34981 | aatagagtga ataaatattt ataataatgg tgtaagaaca tgctgaatag tatactgtat |
| 35041 | taaagttaca tgatcttgtc ttgaattttg tgtttggaat agtactaaga aatatgctga |
| 35101 | gggagaaatt gagtggcaat tttcaaatta atatatattt aYtgagctac tactatgtgc |
| 35161 | aaggcacagc acccaggcac tacatgggac acaaagataa atgcatacag tcttctcaat |
| 35221 | gaaattacaa tcaataMggg ataataagac aagaggtcaa atatttaaca tacagggact |
| 35281 | agtaggacct atagaaagga aagatcctat tatttgggaa gatataaaaa gtcttttggg |
| 35341 | ataaggtggt atgaaaagga aatgaagtaa tgataacttg aactgaagat gaatagaata |
| 35401 | ggttctacta aaatttgtcc aggcccagcc taacatgcta ggttacccgt ggctacattc |
| 35461 | tgttatttct gctgcttaat gagtacatga caatatgttc tggtcattat aggaattctt |
| 35521 | aaaacaagga gtcattctgc cttagcaggt ggcatcttga ggcttttgga ttctgtcttc |
| 35581 | aagtttttta atgagcaaca ggccaaacgt ggattagttt gaagcagctt ctgtggactg |
| 35641 | tgtcaatctg tatgcgaggg tgaatgagta gagagggtgg tatggaaaac aactcctgtg |
| 35701 | attcccttaa ccttctttga ggaagggaaa aacttgggat aaaactgagt attttttcaa |
| 35761 | gtctactggt gagaaaagca tgtcataacc gaattgcatc tgtttgggta tcatagtggt |
| 35821 | ttggggtgta aattagttat tcgaagagta gtatcgatat gaataattga ttaattattt |
| 35881 | cattctacat cttttttcct aaaataattt aggaaaacaa caccctaatc agtttttctc |
| 35941 | aaaactaggc atttgtagcc cccatttttg ctagcaggag ttgaatgtag tttttaaagc |
| 36001 | tgaaaataaa ccaWcacatt ttctaaaact ctttatagtg agagcatagg tcttaggaaa |
| 36061 | aaatatatta gcattaataa gtaaattgtc tcaagtcata ctaaagcaca ttactaggat |
| 36121 | cagtaaaaaa tatatatgca caattgtgta ttagattctg tggctagcaa acgaaaaatt |
| 36181 | ttccaagctg accttaaccg gagcccatct tggtagatgt ttcaactatt gtcacatcaa |
| 36241 | ccttgagaag agttcaaaca ctaagaatga atgagggaag aggtagcggc tgaaaggatt |
| 36301 | actgagctcc acattgactt gatggtcaaa agggcattat ggctctgaat tttgatgagg |
| 36361 | cacatttacc ctttagccca tgttaacatt ttcttcagga ttcattacta ttaaaattat |
| 36421 | ttatgaaaaa gtttttgtRc tggatcatta ccatcagaat aatcagaatg aatgccacac |
| 36481 | tgaatatcaa aagaaataaa actaaaatca ttataaggac acaaccatgt gatatttgtc |
| 36541 | catctgctct ttaagcaatg ttatgttatt tcttgcaacc cctacacaaa ggccaagaaa |
| 36601 | ttacacaagt actagtttat tggttattca cggagagtga gtacctgaag gagaaggctg |
| 36661 | tccttttact acaccatttt tagtcttttc ttctgaattc attacttcct tgtagataag |
| 36721 | ttctgtaaga aacagctgtg ttattataga aaacaaattt atccttcatc cacagggaaa |
| 36781 | ttcattactt aatgccaaat aattacgttt tgatggggtt gagtaaatta aaaatcaRtt |
| 36841 | gagattcctt tactgctcta tttctatttc tatattgcct tgtaattaRc agagagcctg |
| 36901 | gcacaaatag gtatctagta aagcagttga agaaatcaat gcatgaaaat ttatttctac |
| 36961 | gtacatgaaa catactattt atttccatat acatagtatt tatttctaca tacatttcta |
| 37021 | cataaataac atttatttct acatgcatga aatatttcta cataaatgaa acaagtaata |
| 37081 | catgttttac ttgttttctg aattctttgg gggaagtact aatacattct agctcaatct |
| 37141 | agcaacaatt tttatggctt tgaacatcca tttttcttta tacttatttc ctatgaaatg |
| 37201 | cacacattct catgacttta aattattacc aatccttaca acttccatct cttactgcat |
| 37261 | cttttttttt ttccagactc atatcttgga cttgtaaatc taaacttgcc aaaaaccaaa |
| 37321 | cacattaaaa aatttagttc atttactctc agactggcat ccatttttgg ctttctgaat |
| 37381 | gctagagtta aattggatag tttcagttct gtttactctg tccctttagc taaaaatcat |
| 37441 | tccgccctac tcattcttgc tttgcaatgg cttataatct gtataatcat catcctttac |
| 37501 | atgtacttct ttctccaatt tctcacaatt tagtccatgt cctcctcaaa tgatggttat |
| 37561 | atcctatcac ccacctattc atgagcccct aaggagtgcc ttcctgtcct tacttggatc |
| 37621 | aaagcaactc tttttcatct atatcaagca tcttttttca cttgatccac tttttgtata |
| 37681 | tgttcatttt tccatattca ccaacatgac cctggaatct ctggaccagt ggaatctctt |
| 37741 | tagtatcttt taaaattttt ttattttatt ttttatttta catatatata tagagagagg |
| 37801 | cagagacttt ctctgtcacc caggcttgag tacaatggca caatcatggc tcaccgcagc |
| 37861 | ctcaacttcc tggactcaag tgatcctccc acctcagcct cccaagtagc tgggactaca |
| 37921 | ggtgtgtacc actatgcccg gctaattttt gtatgtttct ageagagaca gggtctccct |
| 37981 | atgttgccca ggttggttct gaactcccgg gctcaagtga tcccccagcc tcagcctccc |
| 38041 | aaactgctgg gattacaggt gtgagtcatc gctcctggcc ctgtttagta tctttataac |
| 38101 | attttctgct tattcctgtc ctttgttttc ctcttagtcc tttatctgat attttcttaa |
| 38161 | tattttttct tttcctaatt tacacttatt aattcctgca aggtagctca aatgttcctt |
| 38221 | cccttcagct cttcccattt tgatctgatc atttgctaca atctgcattt gactttctca |
| 38281 | tatttattct attctgtagt gatttagatt agtagattag attaataggc tactcagata |
| 38341 | cacatatttt ctatgtaaat tctcaagtct tatcaatcca atgagtaaac tcatatattg |
| 38401 | actatctttt attttctaaa gtctaaaacc atctcagaat taattttaat ttcatgcttc |
| 38461 | atatgatgat tttatgtaca aacatagaaa gttgtattct ggaattctga actaaagctt |
| 38521 | gccccccacc atgacaaaca ctgacaatca gtaccatttt aaaaggtatc gacaaacact |
| 38581 | gacaatcagt accattttaa aaggtatcaa tggtaaatgc ctttcattct tgagcaaaYg |
| 38641 | tgacattgct ttcggcMtga aaagacagat gaagttttag gagctttaaa aatggtctaa |
| 38701 | gagaatagca gtcagcaaat cattttttag taaattgttt tacaaggaaa agccttgttg |
| 38761 | atactttctg agttcaataa aataaaaagt atactttttt aagtagtaga cttacctttc |
| 38821 | cattcttcaa ttgtgtgttc tctttcatcc aactgcttgt cataYatctg aggtggaggc |
| 38881 | tgccRaataa aaacaaaaaa taatctttgt gtgataatgt aaacataact aaactcttac |
| 38941 | aaYgcacgag aataccttgc cctcatttat ttcggtgatt tcaaccgtat ataagttatg |
| 39001 | aggaaattac agtagttcag aagttaaaat tttcYtgtaa acttaYggag gattcattca |
| 39061 | tattgcaata tttgctgctg acccaatatt gctgcaatat ttgcagcaga acgcaaatcc |
| 39121 | cgagagctca ctttccgaca tcttctgatt tagaacccac gcctaagcaa ttaatgactg |
| 39181 | gtcttttaaa aaacagacaa aacacttgat tacaatgRcc cagaagctac ttttccttca |
| 39241 | Ytcacttgcc ttataacaga accatgctaa aattcttcta ggctaataag attttgttct |
| 39301 | atttttagac cttccctaaa gaaaagttta tatttctcaa cagaccatag tactagtcct |
| 39361 | caatataaaa aaaattgaga tcaaatcaac ctttttattt ttcatgaaat accatagaat |
| 39421 | gtctttatat attgctgtgt gccctatact taaacgattt taagcttttt ggtttgtttg |
| 39481 | tttatttgtt ttaacctgca gaagctgcca tgactgtaga ggtaggtcac cttgaatccc |
| 39541 | tgaatggccc ttggttagtc ctctctagca gaaatgatgc aatagggcct tcagtctgac |
| 39601 | ttatagagcc agcatttctc ttcccatgtg gagttcaaat gtggaaaagg agggattttc |
| 39661 | acaaacctgc gtgcctactg gaaagtggaa tctcaaataa attctctgac ctcttcttcc |
| 39721 | tgatatttag gctttgggag atctaccatg gcggctaggg tagctccaat tcaggccaag |
| 39781 | tgatatggaa agaaaaaaaa aaggctcttg gaaaaataaa tcaccatgag gtagagaaag |
| 39841 | aggaggctga ggggctacac tggctggcac cggtttaagc gcaaagaaga gctatcaagt |
| 39901 | ttttgctacc ccgtccaata ctccaaaagc aatagttttt gtgaaaaact aaaagagtca |
| 39961 | ctcaataaga gtgatgcaac ccctttagga cacagacctt tcaaaaatgg ctattatagt |
| 40021 | aaggaaagct ctggacaaga ttttcagaga cagcttctgg cttctgtgag agctttttgg |
| 40081 | ctcatgaaca gcaccctcgg gctaMagtga cccttctcta attcatgcag aatctgtggt |
| 40141 | agcttgaatc atgacagaca caaatattca tcctagccct ggcatgctgg ggcctcacat |
| 40201 | cctgcaaagt atctggctat gaaaatagaa gactttgccY ggctgtggtg aagtaactta |
| 40261 | gcataatact gaagtattga gaaataacta ctcacggagc cagacattct tttagcacgt |
| 40321 | ttgactgata ctggggcaga aggctgtaaa cctcacctac tgcatttcag atgtggctgg |
| 40381 | ctgagcagct ctcagcagcc gtcagcactg acaactaagc aaaatgagac tctcacacca |
| 40441 | ccccagacaa tagtaagaac acaacacatt gaacgtatat aaggtgacag gactgggata |
| 40501 | gtcaggcact gctctcagga cctgactgag gtagaacctt ccacctctat aaaggactct |
| 40561 | caaataatag aaacattctg acttagtgag tgaatgagta aaatgaagtt atttttgaaa |
| 40621 | aattgtgaaa ccattaccta aggaagctac cacaaagcca aactctggtt ttgtaaagac |
| 40681 | gctttgccaa gtggtaaatt tccggctttg cctcttcctg agcatgtata atgctgtggt |
| 40741 | taggccgcta tccaagcgac cttgtccagg acccctgcag gacacagtgt acataagctc |
| 40801 | tcagagcccc cagagccctc tgagctgttg gcacctcctt cttcttctaa caatagatcc |
| 40861 | agctcatgat cctgcctggc tggcttctcc atgcagtgga tttttccatt caagttttaa |
| 40921 | aattgaacat ggctcaagag tacagttcct gccaaagttc ataaatgcca ttttcttttt |
| 40981 | gcaacaaagc tattttcagg aggtttccct aggagcctca gtgtacagct gttgctgata |
| 41041 | tataaagcac aaagtacata gacactaatc acaaacaaac tacaagagag aatgcaaagt |
| 41101 | gctgagttca agatttttcc tttcaacaaa ccaagagggc tgctttaaac cacttgattt |
| 41161 | aYagtatttg ttcgacggcc tctgcaaatt tactacatat tcagattttt gattgtttgt |
| 41221 | tttttgaaga ggaaatgcga atgtcacctc cagtgaaagg gcacattcac atacagatgt |
| 41281 | cttctatgtg acaatataaa agaataattg accaataatc cagagagagc aatgttacaa |
| 41341 | cacacacgta taagtgctgg gcagcaatca tcaggatgag atagttcaaa acattccctg |
| 41401 | cctccttccg ctaaggagaa gttggtattt gagcactcgc ttgtgctctt tccctatctt |
| 41461 | atttaatagg aattattctt ttgctaagtg acaatctaaa taaaaaataa atgaggagtg |
| 41521 | gggataaaga aaaatgcccc agaggtgtct gttgagagag tattttagga gagtttagca |
| 41581 | gataagagta attgagatgt gagaaatgaa ggataagagg acattaaaga tagtatatga |
| 41641 | acagttatca gggcctgtga ctttcaccct ttgaatattt tttcaaaaga ctgtaaactt |
| 41701 | ctttcatatt attttggaag atttgaactt ccttggttga aattattgca gaaattcaaa |
| 41761 | cacaaattta tatggattgc ataaacaata acttaaaatg gattagacac atttttattg |
| 41821 | atggttaatt tcatatgaat ttatattggt ggtcaattat atgaatttta tactgatgaa |
| 41881 | acatgtccaa attgtttcaa ttaaatgagg aaaaaaacac aaacaagtac atggtcactg |
| 41941 | tgaattaata aatactagaa tttatttatt tctttattaa atgtattcat tcagtaaagg |
| 42001 | tcttgggcac ctaacacatg gcagactata taaaaaactg agatttcaaa attgaataag |
| 42061 | gtgactgctg accacaagga gttcacaatt tactggggta agactgatgc aaaacagatc |
| 42121 | attagtatac aacatgataa atgatagaaa cctgtatatg gtctaaggga acagggtgga |
| 42181 | gaagtcctaa caaagcctag atttgatttc ctggagtaaa gtgatgctta ttcagtgagc |
| 42241 | gaaagatgtg tgggaggttg tcaagataaa agaaggagga aaaaagtgac tccatgccaa |
| 42301 | gagcacatta taagccaagt tacagtatgt agaaaacaga ataggggtgg tggtggtggt |
| 42361 | ggtggtagtg gtagtggtgg tgcatgtgtt tctctgtgtg tacatgcatg ccaagaaaac |
| 42421 | aagaaggaat tttgtcacag taaaataaaa catgtcgtca gaagtgacaa gatataMgag |
| 42481 | ctgtacttag agaagcagaa gggtcagaca aagggtggat caaggatgat ccagggggcc |
| 42541 | aggcgctgtg gctcatgcct gtaatcccag aactctggga ggccgaggtg ggtggattat |
| 42601 | ttgaagtcag gagttcaaga ccagcctggc caacatggtg aaaccccacc tctactaaaa |
| 42661 | atacaaaaat tagccgggca tggtggcagg cacctgtaat cccagctact cgggaggctg |
| 42721 | aggcaggaga atcgcttgaa cccgggaggt ggaggttgca gtgagcccag attgtgccac |
| 42781 | tgcactccag cctgggtgat agagtgagac tctgtctcaa aaaaaaaaaa aaaaaaaaaa |
| 42841 | aaatgatcca gggtatcatg atacggaaga aagaagaaga gaaaccactg aggaatgtaa |
| 42901 | gagaacggaa cagtgaaatt tacagctgga ttgaagaaag atgtaactgt aagcagagag |
| 42961 | aagaggtagg gagccattgc acgatctata aaaaaatatt gaaagttctg actgcggtta |
| 43021 | aaaaaaaaaa aagatgaggg tgaacgaaag acacagattc aggaataatt aataaatgtt |
| 43081 | aataaataaa cttggtagaa gttggttttt gattgaacat atgtgatggg agagaagaat |
| 43141 | atgagtcccc aatttctaag ctgagtacct gggaagatga tcgtgttggt gaagccatct |
| 43201 | aaagaaatag agaatggaaa aggggaaatg agattggtag aggtgagcct aagtgttatg |
| 43261 | tgagaagaga tgatgatttg aaagttaagt atataatctg aagttcagag gaatgctgtt |
| 43321 | ggctagagat gtgtatagat ttgagactaa cagcaagtga tgtttgttga aactatgaca |
| 43381 | gtggatgagg tcacccaggg aagatatgtg ggtatagaga gtaaatggcc aaattaaaat |
| 43441 | ttaaagattg gacagaggaa ggtaagttca ctaaggcaaa agagaatagc taaagaaata |
| 43501 | catgaaaaat gagaatattg caatgttata gaagtcaagc aagtagaatt tcacaaaaag |
| 43561 | ctagtaattg gccatttctt gcaaatgaag cacatgagga ttttgactcg cagggcacca |
| 43621 | gaaaggcatg atagaaagca tgcctctgaa ccctttgaaa gctttccaaa ctttaaattg |
| 43681 | ctatcacccc cagaaagatc cagatagatc ttcggtggag gacgttaata tgagacatca |
| 43741 | cctaaacaat tgaataaaat gtagaaaaag atcctcaaca ccaatataat taaaaggaaa |
| 43801 | gaaaccatag aacaattgtg acactagaaa aactataatg atctcagatc tactctctca |
| 43861 | agtctctgag aacttgataa aaaaaaaaac actgttctct atctagttaa aggaagtcac |
| 43921 | tttttttctg agaaaccacc atatgttaag ctgtctttat atagacctta ataatcctca |
| 43981 | cagtcaggaa actaagattc aaggaaattt taaaaaatat atcatgaagt catatagcta |
| 44041 | attaatgatg aaacttttat taaaacccaa tttaaagagt aatccagagc aagtgtcaat |
| 44101 | actgttgaat ctaaaataaa gactaataaa acaatattta aagtgaacat ctttgtaaaa |
| 44161 | caagaaatag aaacataagc caatagggtg accatatttc ccagtttgta caaaatagtt |
| 44221 | ccattttatg cttattgtcc ttgtaattat tagtagcact tacgcccttc gctcctttaa |
| 44281 | gtgttgtggt ttggagaata aatatgtgga cactctacat agcaatgttg tgacatggca |
| 44341 | tgttagagat ctaaggtata cagtaatttg aggacaaaga aaacaactga attgcaatgt |
| 44401 | ttttctacca ctgaggtttc aacaattgca gctgtacctt ttccttctct gagacagcac |
| 44461 | gtcagcattt ccttccattt tctctatttt tagaaacgta aaattcagct ataaaatatg |
| 44521 | gctgttggca gacagtacag acaagagtag aattctgcat aataaatcta tagttgaaaa |
| 44581 | atatggattc tgtgggcatt ctatggagtt cttgctgttg gccatgactt tctactaaag |
| 44641 | cgatctcttt aacaagtacc tgttcaattc ctaattgagc tttcgaaggt aaaagttgct |
| 44701 | ctttctgcct gtaatcccag gcctttggga ggccgaggtg ggcagatcac gaggtcagga |
| 44761 | gatcgagacc atcctggcta acacagtgaa accccatctc tactaaaagt ataaaaaatt |
| 44821 | agccgggcat tgtggcaggt gcctgtgttc ccagctactc gggaggctga ggcaggagaa |
| 44881 | tggcataaac ttgggaggtg gagcttgcag tgagccaaga tcacaccact gcattccagc |
| 44941 | ctgggtgact gagcgagact ccgtctaaaa aaaaaaaaaa gttgcccttt cttgtgactt |
| 45001 | cattcatttt atcccatata tataagtaat attcattgag taaaatgtgt gaatttattt |
| 45061 | tttactgaat ctttgagata attttcaaag atacatggga agtatctttt tcaacagcat |
| 45121 | tataggatat tagtggtaaa agaaagttca gagattatct aatgccaccc ttattcaatt |
| 45181 | ttcaaatgag aatatagaaa ctgagaaagc ataagtgatt tgcccacaat cacagagtta |
| 45241 | attagtgaca gatgaataca tttatggtct cttatgggaa aagacagaat aatggaattc |
| 45301 | ttatggttga agaaacttta aactggataa tttgacacct gtaaaagata ttcattaaag |
| 45361 | acaaatttgt gcctgccaca cactgatttc tgttccaatt ttctgtcagt ctacacttac |
| 45421 | agctagagct ggcaactatc atacaagcag tcaacactta cattcttaaa cacttttttg |
| 45481 | tcaaagtatc atggacatca aagacctcta aacacatgaa tctctaaaga gataaaaacc |
| 45541 | agatatgaga aatctaagtt gtacaaagtt gttcctttga ttcttctttg agccctgaac |
| 45601 | tgacattttt ccctaacact tatgctctga accatatgac agtccatcaa gttgttggtg |
| 45661 | tttgtctgct ttgtcctaat taaggatctc cctgtgttct gctgccttgt ttaaaatgtc |
| 45721 | aacaaaagct ttaaatagca ctgtatctca gtgtgtgcac tcattattaa ttcaacatct |
| 45781 | ggatcaaagt aaatgatatt atatcttact gaaatatgct ttgttttttc ttattaagct |
| 45841 | tggcagttag atgattgtca aaagatgcat gctttattaa aacgctttaa gcaagaaggg |
| 45901 | tatatcttag tacaaaatta gatagaacag gaaatccatt aaggaaatat acaacatttt |
| 45961 | gattttatat ttccttgaat ctctacacat agagttttct aatttttttt ttcttaattt |
| 46021 | gatgactagg acttgttaaa ttttcaccaa ttaattagaa aataaaaatt ttggtaaaat |
| 46081 | gactctgatg aagcacaaaa tgatatgcac ttttattgtt ttatttggct aatggcacag |
| 46141 | tttagcatgt ccaatttttc tctaaagcct tatattctct gtggcaccaa Sagcagttca |
| 46201 | ttaccccaaa atggagctca gtatttgttt cacaaatagt cttaccaaca atcgccaaaa |
| 46261 | taatgaaaat attattgcaa tatgcacaat tatcaaaaga attgattaga tataattaat |
| 46321 | tcctatgatt tctcagtaat gtgaccttac tatgcattaa gcaatgacct ggtttccaat |
| 46381 | taccaaaaac ttcattgcct tctgaatgta gatatatggc attttgtgat gtactatccg |
| 46441 | ttgattatta aaaattgctt cagcaagttt caggaactat gtctgtgttc tcaaacagaa |
| 46501 | attaaataat atactactac agattaaata aatgcctttt aaaagtatga tttgaggaga |
| 46561 | tgtcagcaag atgataaaat aaggctctcc agtgctccct ctctcacaga aacatcaatt |
| 46621 | tgaacaacta tccgcacaca aaaatacctt cacaaaagtg aaggaaacca ggtgagagat |
| 46681 | ttcagcacct gggtatagca cggaaacaag aaaagatgca ctggagagag aggaaggaca |
| 46741 | gtttcacatt acctgcttca cttttccccc aattaccaga cagcacagca tggagacaga |
| 46801 | taccctccac atgatggtag gagaaggaag tgagcatcag actttgcctt agaccccaac |
| 46861 | actgggcctg ccacagaaaa acccagcacc aaagagaccc tcacagccct agacaccagg |
| 46921 | ctagtacttg tggactgagc ttccacacct ttcccagcac tgatcagggg cttatagcct |
| 46981 | tagactcaag gtctatacag cagacttggt ctctgggcca ctctactgcc aggtctacct |
| 47041 | tagcagccca gcctctggaa cttctccagc actgggctgt cccctataat cctggacatc |
| 47101 | agatccatcc cagtaactga ctatttcctg cagactcaga ctcaaagcca atcccagagc |
| 47161 | caagtagccc cctgtggacc caaggataag gccagcctct acagatgtag gcaaatattt |
| 47221 | gcagacatag gcgtcaggtc tgcccttgtg tacccaggtt tcaggcctat ccatggggac |
| 47281 | tcaatcaata ggtccacact tgtggatcta gacttaggcc caaccctata gacccaccca |
| 47341 | cctgctgacc caggcaccca gacaccaagc ccagccaacc tacctgagga ctccaacagc |
| 47401 | aggcctaccc ttagacgaca ccaaatggca tgcacaggtt ctatggaaag gctgactgat |
| 47461 | aaagagtttt cccagacaaa gccagtctgc aaagactgga ataagccctt acttcttcag |
| 47521 | atgcacagac atcagtgtaa ggaaataaga aacatgaaaa gctgaggtga cataaaccac |
| 47581 | caaaaaaata caaaaatctc ccagtggctg agtcaagaga agtggaaata tataaactaa |
| 47641 | gagacaaaaa agtcaaaata attgttttaa ggaagctcaa caaacttcaa aaaaattaca |
| 47701 | gggaaacaat ttcataaaat caagaaaaca ataaataaaa caaatttaat agagagattg |
| 47761 | aaattatttt tcaaagacaa agagaaatcc tattgccgaa tataatgaat gaatgaaaaa |
| 47821 | tgcaatagta ggattgatga aggagaagaa agaatttgta gccttgaaga caagttattt |
| 47881 | aaaaatatat ggtcagaaga gaaaaaatga aaacaaatag agaaagttta tgtgatttat |
| 47941 | gggagagcat caaaagagca cattttttag ttcaagaaga gaaagacaaa ggggtaggaa |
| 48001 | gtatgtttaa ggaaataata acagaaatgt tttcatatct tgggaaagac atattcacgt |
| 48061 | agaggaaagt taaagttctc taatcagatt caattcaaac aagattacac caagatatat |
| 48121 | cataatgaaa tcaacaaaaa tcaaagacaa agaaaggatc ctaaaggcac caagagaaaa |
| 48181 | gaagcaaata acatttaagg gaatgttcct atcaagctag cagatttttc ggcagaaacc |
| 48241 | ttacaggcca ggagtgtatg ggacaacata atcaaaatgt taaaataaaa taaaaaaact |
| 48301 | atcaattagg aatactgtac cccacaaagt tgtccttcag aaaaggagag ataaagtctt |
| 48361 | tccacaacaa aagttgaggg agttcaccac cagacctgtc tcacaagaag atgcttaaga |
| 48421 | gagttcttca ggctaaaaga aaagcattct aattagtgac acaaaaacat gtgaaagtgt |
| 48481 | aaaactcact tacaaagata agtacacagt caaactcaca acaccctaat actgtaatgg |
| 48541 | tggtatgtaa ttcacctata tctttaccat gaaggtgaaa agaaaaaaac tactaagaat |
| 48601 | aacaatagct acaataatgt gttaaggcat ctacaaccac ctgatcttcg acaaacctga |
| 48661 | caaaaacaag caatggggaa aagattccct atttaataaa tgatgctggg aaaactgcct |
| 48721 | agccatatgc agaaaactga aaccagactc gttccttaca ccttatacaa aaattaactc |
| 48781 | aagatcgatt aaagacttaa atgtaaaacc caaaaccata aaaaccctag aagaaaacct |
| 48841 | aggcaatacc attcaggaca taggcatggg caaagacctc attactaaaa caccaaaagc |
| 48901 | aattgcaaca aaagaaaaat tgacaattgg gatctaatta aactaaagag cttctgcaca |
| 48961 | gcaaaagaaa ctatcatcag actgaacagg caacctacag aaagggagaa aatttttgca |
| 49021 | atctactcat ttgacaaagg tctaatatcc agaatctacc aaatttacaa gaaaaaaaca |
| 49081 | aacaacccca tcaaaaagtg ggcgaaggac atgaacagac acttctcaaa agaagacatt |
| 49141 | tatgtggcca acaaacatgt gaaaaaaagc tcatcatcac tggtcattgg agaagtgcaa |
| 49201 | atcaaaacca cagtgagata ccatctcatg ccagttacaa tggtgattat taaaaaggaa |
| 49261 | acaacagatg ctggcgaggc tgtggagaaa caggaacgct tttacactgt tgctgggagt |
| 49321 | gtaaattagt tcagcaattg tggaagacaa tgtagtgatt cctcaaagat ctagaaccag |
| 49381 | aaataccatt tgacccggca atcccattac tgggtatata tccgaaggat tctaaattat |
| 49441 | tctgttctaa agacacatgc acacatatgt ttattgcagc actatataca atagcaaata |
| 49501 | cttggaacca acccaaatgc ccatcaatga tagactggat aaagaaaatg tggcacatat |
| 49561 | acaccttgga atactatgca gcaataaaaa agaatgagtt catgtccttt gcagggatat |
| 49621 | ggatgaagct agaagccatc atcctcagca aactaacaac tagcacagga acaaaaaacc |
| 49681 | aaacactgcg tgttctcact cataagtgag agttgaacaa tgagaacaca tggacacagg |
| 49741 | gaggagaaca tcacacacca ggacctgtca gagggttggg ggcaagggaa gggagagcat |
| 49801 | taggaccata cctaatgcat gctgggctta aaacctagaa gctgggttga taggtgcagc |
| 49861 | aaaccaccat ggcacatatt tacctatgta acaaacctgc acgttctgca catgtatccc |
| 49921 | agaacttaaa gtaaaatttt aaaaaaaagt gttaagggat acacaatata aaaatatgtt |
| 49981 | aattgtgaca tcaaaaattt taaatgtggg aggaatggtg gagtaaaagt atagtttttt |
| 50041 | aaaaatgcaa gcaaaaagtt gttatcagct taaagtagct tgttataact ataagatgtt |
| 50101 | tttgtaattc tcatggtaac cacaaagtaa aaatttatgg tagagacaaa aaagatacaa |
| 50161 | agtagggaat caaagcatac caccagagaa aattatttta tcagaaaaaa aagacaaaaa |
| 50221 | aagaggggaa gaaatgaaca aagaacctac aaaacaacca gaaaacaatg agctaaatgg |
| 50281 | cagtattaag tccttaccta ttaataatta ccttgaatgc aaattgatta aattttccag |
| 50341 | tcaccttgga tgtgaagggg gctgagggaa tagaaagaaa agactccaag gtatctcatt |
| 50401 | atccagatga aaacctggat agaaagtagt gccatgaatt ggaaggagga agcatagatt |
| 50461 | tggtgtRgag aggagatatg gccagtttaa tatttaatat gttgattttg caatgccaat |
| 50521 | ttcaattcca gtgactgtta gatttataca tctggaactc aggccagctc tatgggacga |
| 50581 | tgtgtagaat tgagccattt atgataatta aaattaaggc tgtggtggaa gataagactc |
| 50641 | ccagagagaa aagaaataag ggctataaag aaaaaatttc tgagatgcac aattctaagg |
| 50701 | gaagagagaa caacccacat tgagcaatgg aggctgcagg agaacaggtg tgctgccacc |
| 50761 | acagaaatta acatgcaggg gtgcagaaag gaaggtgttg tcagcttatt caaatgggca |
| 50821 | aatacatgag atacccattt ttttggactt ggcacctaag aggccactgg tgaatttaga |
| 50881 | gaaagcagtg tcaatgttta aaaagtgaac tggagtaatt gtgagtaaac aaggactaat |
| 50941 | gttttataga gacttggcta taaagctata agtcatactt ccattgctaa aggtagaagt |
| 51001 | gtagttaaaa ataaaggttt gctttgattc tttgttcttt gaaatgaaag agactagaac |
| 51061 | atgtttattt gtaagaagta attgccactg gaaactgaaa cataggacac acacagagaa |
| 51121 | ggaagagacc cacatgcaga aaacaaaggc tataaataaa agagtacagt gtcctgggtt |
| 51181 | ttcctggatc ttgtgtaaat gactccatca cagcattatc atgttttctt ctcaacatct |
| 51241 | tcatcattct actaccattc gtagaaagtg gattttcata tattatctca tttagtcttt |
| 51301 | gtgacaaacc tcctattcca agtatgcaac tgaggcacac aaagatttaa aaatctatga |
| 51361 | gttagtagca gaggccatat ttaaacccaa atctaactga atacaatgtc tgtgttcttt |
| 51421 | gcatttttcc accccaggct tatagttcct actaattcaa cctattgaaa tatattttaa |
| 51481 | cgttttatta ggcaaacaaa gcaacagaga acagcaggga aaaaggcgac tttatctcta |
| 51541 | gctgacgggg ctcttgaaat gctgttaatc aggattctag atacaaattt ccacgtccac |
| 51601 | tcagaggggc gagaatgtgc aatatattgt gatgctgcca ccttgtggca agaaaaaatg |
| 51661 | aaaacattaa gaggtgcttt gtgtgcatat ttatcatttt caattaaatt gctctagttt |
| 51721 | atggttcagc tacggctgca cattgaaatc atctgggagt tttaaaaata ctgctgccta |
| 51781 | gatcccacct cagagattct gatttaattg ttctggggtg aggccttggt gtcaggatat |
| 51841 | ttttaaactt cccaaatgat tctaacatgc agcaaagatt aagacctctg ctctaaccac |
| 51901 | ttatacagta gagaagcaag tcttgtcatt tgcctagtta tgtttcattt gtatagacgc |
| 51961 | aaaagaaaac attctagaga aagtaggtga ttttctctca atctttaatg gcatctagtt |
| 52021 | cttggtagaa tacaatgatt tctggacaga tatatcatat actatgattt taaagaacag |
| 52081 | gacaaagaaa tttgtgaatt gtaatcaaag tggacacaag atttgtgtct cataatcaaa |
| 52141 | tgcagtccgt agactaaagt gagcagggag aatctctgag cctcataatg cgtcacaggt |
| 52201 | tttctgaaag gaacaatgga aagagcactg aagcaccatt gactctggca ctagtaagat |
| 52261 | gagtgacctt gagcaagtca ctcagtttgc aatgaaagat tttcatctac tgctttattc |
| 52321 | aagagaaact agttccaaat gttcaacaaa tatcatacca ggtaattcaa caaaactttc |
| 52381 | ttaagtactt gcaatgcgaa aagcatggaa ttataatgtg ttataaatgg aaagcactaa |
| 52441 | tgttgcttag agacatcata gcattaggtg accagaggaa cctttgaaag ctagtaatgc |
| 52501 | aaattttaat tatgatctga actgagtgta attagaaagc ttaattacat aatgctccag |
| 52561 | tggtttggca aagaagttga attcagtttt ctctattttt cattctgttc tgtagttttc |
| 52621 | tcagatttat ttattagctc tacaccatca aaaagtgtaa tcatgtcttg aaaatgaaat |
| 52681 | ttctctttcc tgctccttgg aaattaaaat tttctatggt tctttaactg aaaagtttca |
| 52741 | gtaattgcac caccaatcac ccagtgcctt ggtcaggaat ctttctttct tcattcgttc |
| 52801 | atttaacaca tatttattaa ccctctacca tatgatatta ctcatctttg aattccacct |
| 52861 | cccttaaatt ccaaatttaa ttatttacaa ttcatgtcaa ttattagctt ctaaacatct |
| 52921 | cttgaatatt ctgYccatgt ctacagtgat ttagattact acagatctat cctcctgcct |
| 52981 | tctagctccc ttttctcaac tccagtccca cactgcagac agtggccctt tgaaacttca |
| 53041 | aatctgctaa tgctattgcc ccacttccta gtgaatggct tcccttcacc ctaggatagc |
| 53101 | atgcatggta catgacaatg cttgggaact ccttccttat ctggtccctg cttaccagcc |
| 53161 | caaaataatt tctcaccctt ctccattaag tcactcagaa agcttaaagc tttgcaattc |
| 53221 | tctccaccct ctcttgaccc tgggattttt gcatataccc tttcttctgc ttgcctttct |
| 53281 | tcacttggat aatttctttt ttagcccttc atgttcctgt ttgaaaatta atcactccaa |
| 53341 | gcagccttct gtaacccaca ttactgggtt atttttatgt gtttccaatg tacaataagc |
| 53401 | ttaaaatttg gaatacgtat catcaacatt tacttattta tcttctcact agaccatggg |
| 53461 | acaaagaatt gagaataaaa gacctaggaa tccaacttac aagggatgtg aaggacctct |
| 53521 | tcaaggagaa ctacaaacca ctgctctcta tttgtctgtt attcgtgtat aagaatgctt |
| 53581 | gtgatttttg tacattgatt ttgtatcctg agactttgct gaagttgctt atcagcttaa |
| 53641 | ggagattttg gactgagatg atggggtttt ctaaatatgc aatcatgtca tctgcaaaca |
| 53701 | gggacaattt gacttcctgt cttcctattt gaatacgctt tatttctttc tcttgcctga |
| 53761 | ctgccctggc cagaacttcc aatactatgt tgaataggag tggtgagaga gggcatcctt |
| 53821 | gtcttgtgct ggttttcaaa gggaatgttt ccagcttctg cccattcagt atgatatttg |
| 53881 | ctatgggttt gtcataaata gctgttatta ttttgagatt ttgggctgag acaatggggt |
| 53941 | tttctagata tacaattgaa aatctagaag aaatggaagc acagtatata gtacatagta |
| 54001 | gatatccaac aagtatgaac cattgatgaa gaacaattat ttgcattcaa aaatctacga |
| 54061 | tatattaact cggaaaaatt ggtcaggtaa agagatgaaa taaattatga catgtctgac |
| 54121 | attactcaaa taatttttaa aaagtagatt ccagcttttg atatacacat attagccaca |
| 54181 | caatcatggg caatgtgctt aacatccatt aacatcctga gctttagtgt cttcaattct |
| 54241 | aaacacagat acattcattc agcaaatatt gattatatga ctactaaggg ccagacagtg |
| 54301 | ttctaggtag ttgggataca gcagtgcccc aaagagtcac tgtctctctt tttacgcatc |
| 54361 | ttaaattcta gttgatgaga cagataataa aaagagatat ataatgtcaa acagtgacac |
| 54421 | atagagaaaa aagattaaga ggctagagtg taacagagta ctattctatt ttttcttttt |
| 54481 | agtttttttc tttttgtttt tgttttactt tttaaactat tattagtatt atttttacaa |
| 54541 | acacttgtac caagggctga ctttcaatag atcacagcaa ggatcccctc tgctacatat |
| 54601 | gaaaccctga cccagaagca ggtcatctac ttatgtttta gtgccaggtt acacacgaat |
| 54661 | gtgtgttaca tgacgggcaa gggggcggcc gaagagtact attttagaaa ggatggtcat |
| 54721 | aaaaggcttY tttgagaagg taacatttga gcagagattt gaatgaagta aaggagggag |
| 54781 | caatgtgaat atctggagga agaatgtccc aggcagaagg aaatacaatg caaagaccct |
| 54841 | aaagggggag cttgcttggt gtggtaagga aaccgcaagg atgccatata ctggtgcaga |
| 54901 | gtggaaaagg gaagcctaaa ggtgatatca gaaaagtagg caggagccag actaagtaga |
| 54961 | gccatgtttt ccaaactgca gtcatgaaaa caaattggtg tcatcactag caccttttag |
| 55021 | tgtaactaag aagagtaaaa tgagatagaa aatatcagtg tatggttttt cttttgtgtg |
| 55081 | tgtgtacgtg tgtgtgtgca cgcacgtgca cttgtacacg catgctgggt tgcaatgtaa |
| 55141 | aacacccttc ttactatggg ttatgataaa atttgaaaca acactgtggt agggccttgc |
| 55201 | aagccatgat aagtactttg agttttgtta taaatatgat aagaagccat tggaagatgg |
| 55261 | gaaggtgtta gctgaggaat tatgtgaatg taacgtgttt tacattttaa aaggaaaatt |
| 55321 | ctaggcattc tgcagaatgg accacaaggg acaagagtgg tgctgagaga taagtcccag |
| 55381 | aatattacat ggtccagggt agaaatgatg tttgcataga tgaaaggatg agaagtgatc |
| 55441 | tgagtcaagg tatatttaga aagtaagttc agttaagagt tgttgaggat agtcatcatt |
| 55501 | ttctagagtt tttatgaggc ttaaataaga ttggatatca gaaagggttt tataaacact |
| 55561 | agagaagtgc tcagcagagt acagctgagt tcaattcaaa gggcatttac tgaccataca |
| 55621 | ctatgcacct gccattactc tcactgtttt ctctgcactc ggtagataaa actgaatttc |
| 55681 | tgctcccaag gaactttaca gcagtagagt tgtggaagat agacataaaa atgaatcact |
| 55741 | gcagcataat gcacaatatg ataatggcat atggaaggtt ctaaagaaaa tgagttaact |
| 55801 | taaaattctg agaagcagta gcttttgttg caagcctttc ttttcatagg taaaagatca |
| 55861 | cattagcccc aaggatattc tgtaggacaa atatgagcta aaaatgaact agaaaatagc |
| 55921 | tctaggtgaa aaacacatcg aacacagata ttgctgagtt agtctattaa agccacatgt |
| 55981 | catttgcact tttgccctac agtcacaaaa caaaagcaaa tgaacaaggg aaagaggatc |
| 56041 | ttcagccctc ctacataagt aacatgaatc aataaggagt catcctggag accacagaaa |
| 56101 | accacactct tccagttagc atcaatgaat agccccagga tacaaatcca cagtgaatga |
| 56161 | agaaacatag ctacagaatt agaaacatta ttaaggaaaa ttgatttgag tatacttcac |
| 56221 | taatgttaga gggataatat tatattttag gttgaaatgt aataattttt ttaattccaa |
| 56281 | agtgtctatt aattttaaaa tatacatact ttttgttaca aatatttatt tttccccttc |
| 56341 | ataccactaa tctctgtgaa aaagtttaga atgtgacata aaggttctag gttaatgaag |
| 56401 | tctttcaatc aagcataaag acttctgcta atctagtaaa aaccgcccct tctacctaca |
| 56461 | tggattcaat atatttgttg cattatataa gaaagcattt gtgtaccaca tttacatatg |
| 56521 | agatgtttat cagaaagaaa gtggtgctct gaggagaggg agatggggaa cagaatcact |
| 56581 | tgagagtgag gatttatttc caattaatta acatgcccac aagaatctgc cataccccac |
| 56641 | atgaagaatc attgctttaa tatagattga tgagttgata acgttaatga gttgatgact |
| 56701 | gtctctcagg tatgttgggg aacaaaaaag tttgagaaac aaatacagtc ataaagaact |
| 56761 | atattctaat aataaggcgt taccattgct cctacttttt aatgtattat atacattatt |
| 56821 | atataatact ttttaatgta tttaataaat atatctcata gtggattttc ttaaaacaga |
| 56881 | gcttgccttt tcattaagta attactccaa ggagtaattt taaaagaaaa taagtctaac |
| 56941 | tgagcttttg tgttaacatg ataggaactg ataacatttc catttttctt atgtcacata |
| 57001 | gactaaaact gttcagttta aaatagttca attacctcca taagctttaa gaaaaccttc |
| 57061 | tttaataaca tcctatgttt tcaaagttaa ttgggtactt tcacattttt ttcctttaaa |
| 57121 | acattattag acaggacatt tcatgggtaa agattagtga tgcaattata ccaccatctc |
| 57181 | tgaatgtcat tctttcttca tctccattgc cattgaagtc cattttgtca tcttttattt |
| 57241 | caactacttc actagcttcc taaatcatct ttctactatt ttatcacttc atcagtcaga |
| 57301 | aagaatgatc tacctaaaac acgaatccca ttgtgttact ccctgattaa aatctgttcc |
| 57361 | cccaagcctg cagcttgggt accctctggg aatgacttaa aaggtgtttc ctgaccagga |
| 57421 | ccctgcttac atttccagct gcatttctca ccattccctt ccctgctcac agtgaattaa |
| 57481 | ctcatagttc cccaggtgtg tcctggttca tcttctctcc tggccattga gcaggctgct |
| 57541 | tcctttgcct accagattct actcttccac ctccatttca cttggtaact cttgcccatc |
| 57601 | cttttggtcc catttgaggc ttttcttcct cctaaaaacc tcctatgtct gctataggat |
| 57661 | gagttatgcc ttattccttt gtgtttctat ggcactagta ctatggttat agtatcttac |
| 57721 | ttacttacat attaactcta ctacaaacta ctaaataaca gaaactatgt ctttttatca |
| 57781 | ttagaattag tcaatcttca atggcagcgt acacttgaag cttaacaaaa gtttaagtga |
| 57841 | atgaatgtgg tggacctgtc caaggtatga tgagactttg agtccatgtc ctctaattgt |
| 57901 | tgacccacag tggtttccac tgtgctctac tgtctcccag tgccatgacc ttggtctcca |
| 57961 | cactctgtaa ctcttggtcc tcctcccatt gtctgtctac agtcctttgc tttgggaaag |
| 58021 | ctagactaag taaggcaata ttttaaatta actaattgca agccaagttt tttgcctgga |
| 58081 | tttgagctta gccttccatt cttgggggag ctattcatta cttaagaaaa cctacctgtg |
| 58141 | actatgcatg taagaattct ggctaggaat aaactattgt tcatgattaa acaggaatgg |
| 58201 | tgcaagaggc atgagcaggc ctacctcaga aaaagaagtg gtaacagatt gctgtactat |
| 58261 | gaaaacagca ttctggcata taYgtcctga aagaaagtca ccaaaagttc tttacgctaa |
| 58321 | cttagtcaaa aacaacacat accttaggta agaaattttc agaaaaagtg cttgaggStt |
| 58381 | agctaattta tctctcactt tttacagagg aacatcgaag gaattcagct ttcaaaatgc |
| 58441 | acctaaagat agaaatcaga ttcttcttgg aattagaaac tgtggggagc atcttttgat |
| 58501 | tgttgattga actcatgttg ttttacatac attatattct ctttcacaat atattgtggg |
| 58561 | tcattattct acaaacaacc ctctgagtct catatgaaac ctgcagcaag ttatggaagt |
| 58621 | ggcttttatc attcttacaa ttgccctacc attagaaagg gacataataa ttttattata |
| 58681 | gcacatactc ctggaaagac cataaacttt taatagactt gtaaaaaggg agtgtaacct |
| 58741 | tttcaatatt ctgtctcatc tattctacct tctcctcaca tataacgaat gccctagggc |
| 58801 | ctaagtcatg gatctacact tgggaagaaa atgttgagat tcagcctttt ccctgaatct |
| 58861 | gaaggttacc atgatttagc acccaggaat agtttctgcc tatccttttt ctggttcttt |
| 58921 | tgcagctctg caacttccag acttgtggtc tatgtagagt tgtgatgaca ttccgacttc |
| 58981 | atgtctatag ctttcattta gggattttta aatgtcagca taaacatcct acagcgttta |
| 59041 | aagttgtctt cacatcacca cacatattca ttttcagcat cattaatgat tacactttct |
| 59101 | gattattttc ctttctctgc tagactgtca aacttcttag tttacttcct aatattgata |
| 59161 | gcatcaccag ctctaagcat gacttctcaa acaagatgtt tggttaattt tctgtgtgtt |
| 59221 | tttgttgttg ttcatttgat cgtctcaact ttttgttgca atgcacaaca taaccacctt |
| 59281 | cttagatcat ggacaaagaa acaaacaaaa atctttggag acaaacatgg cagaggaaaa |
| 59341 | taaatatcgc aaaggaagtg agtgcttccg aaaaacaaag tggaaacaaa gtatgaggaa |
| 59401 | cccctgaaag cctcacagca taagaaaaga actagctact tgaagagtag acagtggcta |
| 59461 | ttaatttcta tttcttgaaa aaaaaatacc attttaaaat tgtcRgggac cacaagaaac |
| 59521 | tgtttttata atgttaatag tttttttaaa tcacaataat aaaaattgaa agcataatat |
| 59581 | tttacattta tcagttactt ctgcctccac cactttcctt aaaaaaagta ggacttttac |
| 59641 | agatgaaaga gcattttaat acaaatttta aaattacccg aagacaataa attatttcct |
| 59701 | aaaacgtgta ttaaatcttt ttgttatgtc tataaatgat aatctagtct aagagtaact |
| 59761 | tatcagcatt tttgcagtcc cctcccccca tccactgaaa actttcttta ctagactcat |
| 59821 | gattttcaaa attttaagaa ttaaatttgg agtaaaggaa ctccgaagat ctgaaaaagc |
| 59881 | ctgtgaactg gatgtccaga aagatgtaaa tacataatta ttgatagaaa attttgggat |
| 59941 | gtttttcaaa agcccccaga agttcctcta aggaaccctt aggggtcata ggaaagctca |
| 60001 | gtgctgggta gtgagctcct aagagcagag aaatgccctc ctgtgtgcat ctctagatct |
| 60061 | ggtacagttt cagcattcat aggggtgcta taaacatttg ttacgttgaa tcatggagga |
| 60121 | taagtatgta tatactcggg tgttgttgtt gctgttgttt gagatagagt cttcctctgt |
| 60181 | cacctaggct ggagtgctgt ggtgcaatct tggttcactg caaactccRc ctcccaggtt |
| 60241 | taagccattc tcccaccaca gcctcccaag tagctagtgt aagccaccat gcctggctaa |
| 60301 | tttttgtatc tttagtagag acgggatttc gctatgctgc ccaggctggt ctcaaactcc |
| 60361 | tgagttcaag tgatccaccc gccttggcct cccaaagtgc taggattaca ggcctgagcc |
| 60421 | actgtgcctg gagggtattt tttttttaaa aagaagaatg tagtatttaa aagttcatca |
| 60481 | tgcaattaaa cctcattgat tttgagagca aaggagcaaa gaaaaatctg gcaaatagca |
| 60541 | aacctactac ttaaagtaaa cctttaggaa cttaagcagg gctgctcacc aaataattct |
| 60601 | gctgggtaca gaactgatgt ggcctttaaa ttacagagtt tatgtataat aattaacatc |
| 60661 | caggccttgc agaaaacaat attacctctg cagagcatat cattttcttt attgataaat |
| 60721 | gctctttact gaaaacacaa tgatatgagg atgggtagga gtgccttaga gctctccttg |
| 60781 | aacatgtata cacagtggtt aagaggagat tctttgatga tggacaaaaa ttcaagtcta |
| 60841 | gtttgattgt tttagcaaca ttacaggtaa gcaaacaagg caggaatgca aattaccaaa |
| 60901 | agagttatgc ttcctagaga ttccccaatt ttgtagcctc tacttatctc gaggcaaagc |
| 60961 | tgtctgacag agattctgtc ttctgacata ctcctattct tttctctttt ttattcttcc |
| 61021 | tcttagtata aaatttggta aattttagtt aacagaacat ctcacaagtt cccaccctga |
| 61081 | cttctttgct tatttcatag aaggaatSct aaaaaagaaa aatatatatt tttttctccc |
| 61141 | acagtttatg gattacatcc tatgcagatg acacgttgga taatctcttt ttttccagga |
| 61201 | tgaaacatat taagaaaata aaatacactc tcacaaatgc ccactacctc aagataaata |
| 61261 | ggtagatctc acaatatctc agatatcacc taggagagaa gaaataaaat caagtatttg |
| 61321 | gaagaacctg acagaatacc ttagccatac ctcagccttt cagagagcaa caggcatgaa |
| 61381 | atgttttaga aaaataattt ctgttccctt cccccttttc ataaagtatt ctctctcagt |
| 61441 | gatccattca aaagattaat agcactcatg gtctaaagtg ttcaagataa aacatgaaaa |
| 61501 | caaaaaccaa agcatggatt ctactagaca acaaaacatg tctctcctaa gaatgaacaa |
| 61561 | ttcaaccatt ccagcttttc acacctgaga atcttggatt cagtggattc tgaatatccc |
| 61621 | aatgaattaa aattaagatg aacctttctc ttcaggaata gaacttgcta aaattagaga |
| 61681 | taaatgagtt acatattttc agtgaaatac atattcctat tataagtcat atagggagtg |
| 61741 | aggctcctaa aagcaggtgg ctaactctat ctacaacaaa cattttgaca agctcccacc |
| 61801 | aacataatac atggcatcaa aacaatccga aggcaattca aacgatagct tcacgttaag |
| 61861 | cagctgaggc actgggcaag caaaatctaa tgaagctata ttttctctgg aaggcaatta |
| 61921 | gtaaactgct catattttgc tgctgaaaga atacatcagc atgaacagat ggaaatttag |
| 61981 | aactccacaa atggaattac agacattgat ttaactttcc ccaagcaaat gaaaaccaca |
| 62041 | aaatacgaat tgctctttct ataattaagc acataattag agtgcatcag attcatatcc |
| 62101 | attgtagctc atatttcttc ctcctcattt ctaaatttat atatattctg agtctaacaa |
| 62161 | acctacttag agttcaactc cacactgaaa gagtcttcta tgacagatag atggtactaa |
| 62221 | actatttctc aaattaagcc tgccatgggt cacactagct ttttcacagc atgacacatg |
| 62281 | cggcaataat aagaaatcca aagactcaaa gaggtagtcc ttgtggcagg acagatggag |
| 62341 | agaacagctg agggaggaat tcagccagtt tattaactcc atgtgagtag aacaaatcat |
| 62401 | atttaaaaga attcataagg acatctggtc gaaaaacaga atttaaatga tggcagtttt |
| 62461 | agaatggaga aaagagaatc atgatgtctc acagtacaat atcactgagt tacctctttg |
| 62521 | tttttctact tccaggaaac aaaaggtcac cagtgacctg cacacagatt atagaccaaa |
| 62581 | ctggtgRtgg gcacttggga aatacttgga ctaattgtca agtttaaaat atacaagaaa |
| 62641 | tactaaaaca tattatggaa ataaaatcac taacatgcta aacattacag atacttgaaa |
| 62701 | ttattcacat tgttaattat tcttttcctc attctaggat acagtagttt gtcttacttg |
| 62761 | tgaaaatatt taggggaact tagataaaat ttttgtttga tattcctaaa atgctagaaa |
| 62821 | tgacctcaga aatctttttg agaataagcc ctttataaaa acctccaaat aggtctttcc |
| 62881 | tgagaaaact caattgatgt gctttatcaa gtataatagt atgtttcatt tataagcttt |
| 62941 | ccaagttgaa atccaaagta ataagcatgt ttcaaaaaaa atctaaacaa gtaaaaatgg |
| 63001 | ggaaacttac taaaactgtg cacacatata tagcatcaag aaataaacta gcagtaaaat |
| 63061 | ccaaggtcat attcagtgtg ataggcactg cagatctttt ctattaataa aaagcaacag |
| 63121 | aggctttttc taYccatgaa atgttttttt aaaagagctt tcttattatt ttagtgaaat |
| 63181 | gaagtttttc cttcttaata aaaattttca aatttctacc aaaaaaaatc cttaagtaac |
| 63241 | tcaagttttg cagtttatgc ttatttaaat atttgatagg tattttctgc cacttgagag |
| 63301 | ttgctattaa attttatata ataaacttca cttgcaaact gacttccttc tcagacaaat |
| 63361 | caaatgacag caaacaaaaa taatgcctat taactatttt aagtacatta ctgtaccctg |
| 63421 | tggggaaaat caggaaacaa aaactgtagt ttcagaattt cagatggatt agttattcag |
| 63481 | aaattgtctt gaggacatgc cctaaccttt tgatatcact catcaaagga aaatgtgact |
| 63541 | cacaaagact ttaatcccct ttcctcccaa cgggagatac agtctgtata gagagctgtt |
| 63601 | tgcatttata actcaYttaa atcatgtctt ccagatactt caggtttaac tcacagtgct |
| 63661 | acactcaaac taaccaattt aataaaagga ttataaaata tttgaagcaa acttatgcat |
| 63721 | attttattca atggtttatc tccaaacagt agatatctac tgatgaacta tttgaacatt |
| 63781 | agatgcatca aattcatatt cattgtagct catatttttc cttatcattc ctaaattcat |
| 63841 | atatactgag tctaacaaag tacattgctt ctagttataa tcaaatatat ttataagtct |
| 63901 | attcttcacc atgttgtttc aggaatttat tatggattca agagaattca gtaaaagaca |
| 63961 | actggttaag ccacagttaa taaag4taga aacaatgcaa acaagaactc attcatggag |
| 64021 | tagatttaat agagcaagta acacaggata ttcataatca aatgatatta gcttttacag |
| 64081 | taaaaatgta tttgagagaa ttaaaagtca gtgataataa ggaatgagaa taactccttc |
| 64141 | ccatcatcct cagtcatgtg aactatgctc aaaggcttca gatggtcaat aaattaatac |
| 64201 | atgaatcttt aaaatataaa ttaaatattt ttatttagtt gctatagtaa atagaaagat |
| 64261 | ttaatttata gtttaaagat tgtatacttt tatgtttagt atagcaactt taggattctt |
| 64321 | tggttttcag taataatcta tgcatttggg taaccaaact tagtcagctt ggtcaggact |
| 64381 | tttttgttta tttattttat tttattttat tttattttat ttattttttt taagacggtc |
| 64441 | tcactctgtc tcccaggctg gagtgcagtg gtgcgatctc ggctcactgc aacttctgtc |
| 64501 | tcccgggttc aagcgattct cctgcctcag ccttcccagt acctggcact acaggtggct |
| 64561 | aatttttgta tttttagtag agatggggtt ttgccgtgtt ggccaggccc aaactcctga |
| 64621 | tatcaagtga tccacccgcc ttggcatccc aaagtgctgg gattacaggt gtgagccact |
| 64681 | gtgcccagca ggacattatt ttatattcag tcaaataata gtttaaaaat catagctaaa |
| 64741 | agtggataag cataacttgt taattatgat tcaaagcagt tgatgcacat ctggttgaag |
| 64801 | attagcagat tctcactgca gtttagttat aactgattaa catttcaagg gacataggat |
| 64861 | ttcagattct acagtcagga aaccatacac caaacaagtt aaataatcaa gtaaggtaga |
| 64921 | taattcatat ttggaggagt ttattttgtt tcttcaggag atgataagtt atcaaagatt |
| 64981 | ctcattcaat agaaattgct attaactatt agaaacctac caagaacaat aaaagcaggg |
| 65041 | acctgttttt ttttcatttt ttgtttaaaa attcaatgct gaatcactat catctaggtc |
| 65101 | agtgtggaac acaaagtgtg ggttcagtca atatttatag aataagtgaa taaatactaa |
| 65161 | actgttaaca aatagtcaaa gcttatgtga ataactctgt tggataaaaa agagaaaagg |
| 65221 | gtaagaagtg aagaagagat aaaaaaggaa gaaataaaaa agaggtgagt gagaggaaag |
| 65281 | tgaaaagttc tttcctagtg aaagaggtct ttcctatggc agcagaagag tagatttaca |
| 65341 | gcaacctaaa agaaaacaga tggctgaatc ctttcaYtcc ccttacgtac atgtggtcca |
| 65401 | acattgtctc aacaagactg tagccctaca accaacaatc gMaagagtga catcaacaca |
| 65461 | taaaaggaag gaagtgcaca ttcagtggaa accccaatga gaaatacgct tctgccaaga |
| 65521 | ctatcaggtt ggtatagtac ttgcgatKtc ttggcaagaa atcatgaaat acttgaagaa |
| 65581 | attaaataat tattaggggg atgcttactt cactttacta ggggaggtcc ttgagtacct |
| 65641 | cttctaacat ctaaagtctt ctcctctcca gaggaattgt gctccgttcc ctggttactt |
| 65701 | ctcctttact tagggatttc agaattgtga ataaggaaag aatgacctgg taagtgccag |
| 65761 | ccctggacac atttgcccac agatgctgtc ctcccccttt ctttagttgc tctttttctc |
| 65821 | agggggctgg actctattag gccatatttc ccagatttgt ctgtcagttg ccttaggKtt |
| 65881 | ggtctcagcc aataggaggg agatatcacc aggagacaga ggggagaatc taggccattt |
| 65941 | ctccccaccc ttttctctag aagcagctgt atcttacctg tgttagtgac tctagctccc |
| 66001 | attggacagg ccattactac ctgggctcca gtaaatcgcc ccctagctct caggttggta |
| 66061 | gtggcttccc atttttgctt atctctgtgt tggtccaaga gtgtctgctt ttgacttctg |
| 66121 | cattgcaata tgagaacatc cttatctctg acacctttaa atacccctta gggtctcatc |
| 66181 | tacttagatc tctgatctta gaccacatgt ctctcctgac tRcccagctg gtcttgactg |
| 66241 | cttggcctac atatctgcat cagctgtctc tctggaatgc ccagatcaag ctctggaacc |
| 66301 | tgttctactt tgaccacagg cttctgattc ccttctctct ttcttctgat cccRtctagc |
| 66361 | tctattccat tcacttcatc atggttgctg gtcctatagc tgctcaaagt tgaaaagttg |
| 66421 | ctactctgaa tgctgatgtt tgctgaactg caggacaaaa ccactctata attatctcta |
| 66481 | agttcccact tcagatttac cttgaataga ttttaggcat aataggcata cacaatatca |
| 66541 | aagtttacat atttgtgtca caagaagatt aaaaataaag tatatttccc acatgattgg |
| 66601 | tcatcccttc catgcatcct ctttggtaat atccagtaag atataatggc agacaagaag |
| 66661 | atggataaaa taatgtcaga tagtaactct gctcacaggg catggaatct atgatggcct |
| 66721 | tgtaataaaa tagcttaata tagccaggtt aacttgtttc tataaattct ttcaccgtag |
| 66781 | gcaaaaataa cataatccct aaagtagtga actagtaaat aataataatt aagcatttaa |
| 66841 | gaccctctta atcactttac attataaaca aacagtaaat gtgtaatagt gttgactatt |
| 66901 | ctgggctcat gtttcttaag tgtttatttt aattgaactt cagcactaat acatgtaact |
| 66961 | gttactctgt ttcccaggtt atactctccc tgggaatctg aagatcatgt tgtttaattc |
| 67021 | aggatctgta tcggtagatt aaattcccac ccaaccctgt cccaattccc aaattaatct |
| 67081 | tgagttaggt gaaaaaataa caagcaagct cagcactggc cctgtttacc aaatcacctt |
| 67141 | ccagccaaat tggttgaatt agttacacct tttctcttag tctagtggag gatgtcgtgt |
| 67201 | gtccttagat tcccaaacaa aacWtgcccg ctctctctct gtggtctaca ttatagctgg |
| 67261 | agtacaattt ccaggcctca tttccagcat tctcttctgg aactttcatt tggctgccac |
| 67321 | acagaaggcc ctatgtttcc tgccagctgt cctctgggtt ctcaagtacc ccaggttcac |
| 67381 | ctactagaga aaagaattcc aaaatgccag ctgcccaagc agctctacct gcctctctgc |
| 67441 | cctgattccc agagtaaggt ttcagccatt aagaactgtc tctgggcatc tctgaaacac |
| 67501 | agccttcaac acaatggtct atctggttga tcaccactgg ccatgaagct tggcctcaac |
| 67561 | gcctgtccca tcttagggga tggttctaat ctcaggtcta gctccttcct tttagtcaag |
| 67621 | aattgaggaa tcatgaagtg ttctctgact ccatatgttt gtactaggct tcttcatgat |
| 67681 | gatttatttg agttttgatg tacttggttt tggctgaact cacatctccc tctcctgctc |
| 67741 | cctctcccta tgcccttgca aggaacaaga actacaaaat ggagcctttt gtaaggccgt |
| 67801 | tgcactcagg agctttcttg aagtgctctg aaatttctgg cagaaataaa gctatttaaa |
| 67861 | aaaaatagtt acagcttatg ttcctcttct tctgtgccct gagaaatagt taatcaactc |
| 67921 | ttccttagct tggagttcac ccagatgctc cttaaggctt atctgtagct ccactctcag |
| 67981 | tggtaaagcc accactggat cctagcaggg tgcctaaact cagtaatgtg gtaagagata |
| 68041 | aggcaacaaa gcttcatgaa cattgtattt tcttccaaca gggcacaagg aagatattaa |
| 68101 | actgagttcc ccccaaaatc ccaaaaatct cctactgata atcaagattt gtggaatcta |
| 68161 | taatgtgtct ttattttggt ttaaactaat gacactaKat tttcttctac ctggcaaaga |
| 68221 | agaggtaggt atacattaaa caaaagaaaa tgaaaaaaat ggacctaaaa tcatgtggga |
| 68281 | aatagatcat tgtcatcatt gttcaaaaaa gaaatgttgt ggaatatttc tgcaatttcc |
| 68341 | tggccagcta gtctttttca ccagacgcat atatcttttt caaatatcaa aagatagtaa |
| 68401 | agctatgcat gtaaaagtca taatagtaat agtaattata agtattataa gggtaagaat |
| 68461 | aatttacatg attcttactg actcccaagc atttgctaag cactttaact tttcaaaatc |
| 68521 | tcagaatgct atgctgtaca tatgataaga aaggagaact ttcttagttt agaaaactga |
| 68581 | gttgcagaaa ggttaagcaa cttgatcaaa gcaaattagt aatgggaaga gcagaaattt |
| 68641 | aaacctaact catctttcat acctatgaag atgcaaataa gtcaaccaat tacatttgtg |
| 68701 | tgtaatatat ttgccctctt gatgaataYt gaaccagagt tagagcatct tctatttgtt |
| 68761 | tcatgaaaaa gcattgacat tatacacgat ttgtgtgttc tactttgaaa tcacactttg |
| 68821 | ttactctaaa cattatttga ataagaagtt gctaataatt tgagcagtta tttcaaaata |
| 68881 | tttatgtact attactacac agatggatta ctcttgagct tggcatccaa tttttaaaat |
| 68941 | tttctaactc atgtgtacat gactaatttt ccctctcaga attatgacaa cattcattca |
| 69001 | tatgctcttc tctcttgatt tttgtacttt ggtagtttgg gaaacatgat aagatagMtc |
| 69061 | gtagtataac taatagctta gcacacatag catatctata ctcttttgac ttttcctcta |
| 69121 | aatatcacct tatcatagtt tgttctttat cccctatcca cttgccatta tttccatcca |
| 69181 | atgaaactta tttttcttct ctctcatctt tgaatttcct tccctcccta acagcatgtg |
| 69241 | agttacttga aagctctttg atcagaataa aaatcccaat tatttgatac ttccatttat |
| 69301 | ttggattata aagacatacg ggggtatatt ttgcaaaaca gtcttgtcag ccccggcaga |
| 69361 | agatatatca ctatattata gctttgccat gtgtccatag agaaaggtta tcttatgtta |
| 69421 | aacacatgtt catatgcaat aacagagaca tgaattctaa ggatattgca gaaagcatag |
| 69481 | ctgactactg attctagcac cttcaggatc tttctcttct tagttgYgac cactgtaatg |
| 69541 | cacttcatag agtaataaat tgttcttgcc ctgggatcat gattcccatc tcttcactac |
| 69601 | aacatgtcta gatgtaagac atgtttaccc ttgtataatc aatgatctga gtctagatgt |
| 69661 | caagtacttg cttgttctgt gcattaactg tcttcttttt ctggaactgc aggctctatc |
| 69721 | agatccttcc cctaaaattc atacatcctg ccttgttact atccgtgccc cagcatgacc |
| 69781 | aatatcaaag tggttaagaa aaaggctcca gctattttag tatcctaaat tttatctttt |
| 69841 | cattctacaa agaagttttt cataaaaagt taaaataaat ttaaaaactc attgatacta |
| 69901 | ttcagtaaga tgttatagat tccaagcaac tatctctttt ataggcaaca taattaaaag |
| 69961 | tgaattacaa ttgcagactt tatgactcta attaaactct aggccacaat gcattaaaaa |
| 70021 | cagattatac atattaagtt agatataaga aaaaataaat atgccacata gtgaggcata |
| 70081 | agttaatatg cctcaaaata aatgaggaga aacaatttca gataatacat atttatataa |
| 70141 | aatgtttatc aacataacct aaaatatttt cttgaatttc atcagagata aaatttttat |
| 70201 | acttaatttt tgtaaacata tacatcatac tttctctcac ttacttcact acttcattcc |
| 70261 | atcccaagaa catctgtgca agtatttccc aagtgtggga gactggaaga ggttctatat |
| 70321 | tttggttgta agaatatata ttaattttta gaacattata attaaactca gaaatattta |
| 70381 | attgtaggga tattatttgg taagaatcaa ataaaatgac taaaaattaa cttgaggcaa |
| 70441 | catgaaatct caacatcatt gtaaaactaa gagagcagat cttaaacaaa atgtagtgca |
| 70501 | gtcttcacac ttgggagatt cattaatcac ttaagtgttt tctctgaagt ttttaaatgc |
| 70561 | ttaaagattg ggttacatta tgaaaaggac ctgtttaata ttgtgtctgt aaagttcaat |
| 70621 | tctacctagt tctcactttc tttcgtatct tctctagtga agaatgaaga aatgagaatt |
| 70681 | atgtgtttga atctagcacc tctgacatgg aaaaacacat ggtgaagcag aggaaagaaa |
| 70741 | actgaaagaa agtgaaaata tctttaagaa tacYttgggg aaacaaacag tatttcaaat |
| 70801 | gaaagattaa gaacaaatcc aaacaaatgg attggaaggt attatgtaaa aaaatatgag |
| 70861 | atgctttagc acaggtactc taagaatttg agaagcttct catgtttaag ggagaaggta |
| 70921 | acattcctga tagaaacatt taaaggcagt gcagaaagga aattctcatc aggaggccta |
| 70981 | tagaacacac atgggcaaca gcaagccccc cttgccctgc tcagccctgg atccatacag |
| 71041 | aggaaaggag agaggtaaag atgaaagaaa gaggttgaac agaagatagt aaatggttga |
| 71101 | aaaatatttt taaaatagaa agagttatgc ttctgagaag attctccatg tctgggtatc |
| 71161 | agacatggag atacatcata ctgatcaacc tgaagtaatg tacttactga aatacccact |
| 71221 | tctagttcat cWagttcatg caaggtttca caaagccacc aatcgtttta atcatcttat |
| 71281 | aaaagctttc taattgaaat attcttaagt atcacatttt actagtggca ggtatctttt |
| 71341 | caaaaaaaaa atacaagcta agcaacttgt cctctgttgt ttcctaccac taagtttgca |
| 71401 | ttagaagaga ctggcagtca aacacacaag aagaaacaca agtattggca atttaacaga |
| 71461 | aacaaatggt agtgtatcat ggacatctaa ggtttgtagg actaaatcat accctcttct |
| 71521 | agtaagtcct gaaaaaaatg tatttaaaac atatgttgaa gaaaatagct tttagagggg |
| 71581 | cagataatag gctttggact tagaaatttt ataaaaatcc attgtgcatt ctttaggctt |
| 71641 | ctagtcctat tcagtttttg ctatgagcta tgatttgttt gtggaagcaa agtaaaggca |
| 71701 | gcctatttct taccgcctcc acttcggctg ggtcatacca gacgttgatg tagggatgct |
| 71761 | gtaaggcgtc gtccactgat attctttttg ctgggtcaat cactagcatc tttgacaaca |
| 71821 | agtccctggc ttggctggct gaaacaataa atgagaaaaa caattagtaa gattttgatt |
| 71881 | tcagtaagga aatttgtcag agaggaaatt taagaaaaca aagtatggaa tagtatcttc |
| 71941 | ctKccaaaca tcaggtaaat cccttgatgt gatggaaaag aaaatgcatt ttacacctgt |
| 72001 | ttctttgtgt ctctaagcct aaggcttcat tctgaggctc tccaagggtt gtaacacttt |
| 72061 | gggtatataa ttattcacgc aaacttctta gtaaaatgta tcaacctgga gagtttatgt |
| 72121 | aagcaaagtc atcttctttg gtaacctgca tgaatatagg ataaacagaa taaagagcac |
| 72181 | agagtgcaaa tgcatgatgt tcaacaaatg tgtggacggc tgtttgaagt taatcaacac |
| 72241 | gtgtgtctct atattcttat ttatacaacg gaattatcag aattttagta tataaattga |
| 72301 | cttaagagtt tgtatcatac aaatttttct tttctttttg tttttgttta tttatttatt |
| 72361 | tatttatttt tgagacaggg tatccctctg ttgccaggct ggagtgtagt ggaatgatca |
| 72421 | cagctcactg cagcctggaa ctcctgcgct caaaggatcc tcccatccca gcttcccgag |
| 72481 | taactggaac tacaggcatg caccaccatg cctggctatt ttttctttct ttcttttttt |
| 72541 | ttgtaaagat aagatctccc tacattgccc aagctggtct cgaactctgg gctcaaagat |
| 72601 | cctcccacct cagcctccca aaatgctggg attaaaggag tgagccactg ctcccagcca |
| 72661 | caaatttctt atatacataa aaacaatcaa agaattgaag tgatagaaat aatatcattc |
| 72721 | aactactgaa ttttatttta acattctgta atcatcaggt atttttaatc aatggaatca |
| 72781 | tgacttgatg aaatccagta gttaaagact gaagccagtc taatgctaca ccagacacta |
| 72841 | atgagaaact ctatattatg taaaggttat cataattaat tttatggttg tgggcagtaa |
| 72901 | cagttataaa attatatggt gatagctatt tatttagtaa gattgttaaa agacacatta |
| 72961 | attttaacct ctaaaaatat gtaaattttt taaattatta tactttaagt tctgggatac |
| 73021 | atgtgcacaa catgcaggtt tgttacatag gtatacacat gccatagtgg tttgctgcac |
| 73081 | ccaccaacct gtcatctaca ttaggtattt ctcctaaagc tatccctccc ctagtctttt |
| 73141 | acataaagtt ttaacagaaa tgaatatctc aaatcaatat tgttactcaa ctgatctgaa |
| 73201 | agttgaaccg tgaaaatatt cagtttattc taactatatg gtaaaacatc aaattaaaga |
| 73261 | taacaaaatt taaatggatt tttcaaaaaa tcaacataga tgactctgga tacatatcaa |
| 73321 | tttttattta atcaattttt cagattaaaa caacttggct aattctacaa atttgaaaat |
| 73381 | tatataaaat acaaaaWtca ggaaataata tctaacccca ctagctagag gcaatgactg |
| 73441 | tgattattgg catatttttt ctagtgccgt tcatgtattt ttcacgtaat attaaccata |
| 73501 | ctatagttaa aatgtagcaa ttaatttttt acctgtaagt attttcttgg taattacatc |
| 73561 | aataaatata tcttttaatt ttctgaacaa atatgaaaaa tcactagtta aacttgagaa |
| 73621 | ttttttattt ctattaatca tttttctggg aaactcaatc ctagaaactg attatcatta |
| 73681 | ctttcaaatt aaaactctgt accgcacagg aataacaaaa atacagaaat acttatacat |
| 73741 | taattcaata tttaattttt ctcattgcca atggcctcct aatagcctaa cagggctgtg |
| 73801 | tttatttatt cattgcttta aagacctctt taatttgtaa ctgattttac atccaaattc |
| 73861 | atgtaccatt ctcataagat tctctcatca aatctatcca tttttctgct cttagaaagg |
| 73921 | gctggggtta gccgggcgtg gtcgtggctg acacctgcaa tcccagcact ttggaaggcc |
| 73981 | gaggcaggca gaccacgaag tcaggaggtc gagacgatcc tggctaccac ggtgaaaccc |
| 74041 | catctctact aaaaatacaa aaattagctg ggcgtggtgg cgggcgcctg tagtcccagc |
| 74101 | tactcgggag gttgaggcag gagaatggag tgaacctggg agacggagct tgcagtgagc |
| 74161 | ctagatcggt atcccgggcg acagagcgag actctgtctc aaaaaaaaaa aaaaaaaaaa |
| 74221 | aaagaaaggg ctggggttac aatggattct tcatgaatag ggtcatgaac tacaccaata |
| 74281 | caaaatcatc ttgctaagaa acaatactat ttttaggaaa caatatggga aaatgtttca |
| 74341 | atgctttatc tttcattctt tcatttgaaa gcaaatgtgt tatgctcttt tccaaacaca |
| 74401 | gtagaataca ttcttctctt tggttatttg tatattaaga ttatttataa tttgccaatt |
| 74461 | ttatattaaa aattaaattc aataatcaaa tatgcaaact agtttatcat ttacaaacat |
| 74521 | aattgcagag attcaaattg atttaaaaag taaactcaag aaaattggaa ttacattatg |
| 74581 | aagtataata tatatctatt ttttgagacg gagtcttgct cactctatct ctaggctgga |
| 74641 | atgcagttgc ccgatctcgg ctcactgcaa cctcttcctc ctaggttcaa gcgactctcc |
| 74701 | tgcctcagcc tcctgagtag ctgggactag aggtgtgtgc caccatgccc agctaatttt |
| 74761 | tttatatttt taggagagac gcagtttcac catgttggcc aggatggtct gtctcgattt |
| 74821 | cctgacctct tgatcctccc gcctccgcct tccaaagtgc tgaggttaca gacttgagcc |
| 74881 | accgcccccg gccctgaata tccagacaat tctaaaatcc gtggctactc ccctttgtag |
| 74941 | gaacgatctt tgaagaaata tttctttaac ttgaggctgt gccaattaaa gaattgatca |
| 75001 | atgttttagg tgatgggtta tgctaattgc tctgatttga ccattatacc tctatacatg |
| 75061 | tttcaaaaat accaccctat atcccacaaa aatgtacgat tatcatgtgt caactaaaaa |
| 75121 | taaaagggaa caaagagaaa gagatagagg tctctatact gtgtgcttgt ttggcccgtc |
| 75181 | accctcatag ttgtcctcaa gtcattcctg aagggcatac ctttgagttt attgtgctcg |
| 75241 | gagtccgctg ggaagaggga atctgggaag agtttgggga aggtgagtcc cgcatacttg |
| 75301 | ggccgattct ccacatagtt tcttactgtg ggttgcaatt tcttcatgaa ttctggacat |
| 75361 | ggtgttccta gttgttcaat taccttattc cactggtcaa tatctgagaa ttgaacagtt |
| 75421 | aagggaaaaa agaagagcag accactagcc tttcaacaat tgggagacta actcttctca |
| 75481 | aagtcctcaa cagtcattaa tgcaactgta gttttaataa gcaacaaaga atgaaaatat |
| 75541 | aaaatcagac ttgcaggcta tgagtcttct tgaaatttta aattcacttt tgaaacttat |
| 75601 | atacttttgg aaaactagca attatttaac aaaataagat atcatgaaat agtctttggg |
| 75661 | gtgtacagat aaaaagtcat tcagataaca caagatgaat ctcatattct gcagataaac |
| 75721 | ttctatataa atcatgtgat tcagaagaaa aatatataat gacacatcat agtgacattt |
| 75781 | ttatcctgaa gttacctcaa ttatttatat ttttaaaatg acaaatacac aaatatttta |
| 75841 | gattatattc atttacattt tcctaaacta tctttaagat attttttctt ctctaaaaat |
| 75901 | ctggaatttt tttctatttt tatgcatatc aacataactt ttatagtaaa acaactcatt |
| 75961 | agttctttgt cagattccta aaaatcatat ttattaaaca aagaagccac ctatttcata |
| 76021 | cctattgttt tactgatgat atcactgaat attgttttca atgaaatata agggtgaaca |
| 76081 | gaggaatatt caatttaaaa caacagattt ctatccaagt acatccaagt ttagaaagta |
| 76141 | cattaagcat ggggaatacc acagaaaaaa tattacctct ctatgaaaat taataccctt |
| 76201 | ttaaattgga gctagctctt tttgcagaca tactcaatga ttgagattct cttttttatc |
| 76261 | tgtcattaat attcgatata tcagagcctt gataatgata aacaccatct actctgaaga |
| 76321 | aYcaactgga aacaactgat ttaaacagat ttcctcgcca tgtgccagtg aataatagag |
| 76381 | atcttggaaa ttcccttaaa tccaatactg caagcagtat tctctcctac attgcttatt |
| 76441 | cttctacaac tgttctttgg tgttaagtta gttaactcat ttccactaag gtaaggtgtg |
| 76501 | acagttaagg gactcttacc ataatattac ttagttgaag tttgtcaagt ctttactcct |
| 76561 | agctattcaa gaggtttgga ctgaaaaaga ttgtcagtcc tgattaaaga taaacttaac |
| 76621 | tgtattcaac aaaaagaaat atataataca aacagtagat aggagattga acaaagataa |
| 76681 | aatcaaacta atttgcaaat ccttttcttc atctctataa tctggctgaa taaaacttaa |
| 76741 | attattacat attctgtcag ttattggaat aaaaaatata taaccatgga ctatgaagat |
| 76801 | atgaaatgaa ggtgggaaaa acaataatat tccttaataa agcagtagta ataattaaac |
| 76861 | aagaacatgc tttgatagaa gctcatctaa ttatcatgtg catgagaaaa tacagcagta |
| 76921 | attcagaatc actagaaata atgaaactaa aacattatat aaggttagag ttacaaatta |
| 76981 | ctcttagaca tgagcctgta ttaatactat ggatataggt aagctataag tacttagaca |
| 77041 | tacttaaata gaatacatta gtgtagttaa ataaaaccta agtgcttgtc attataaatt |
| 77101 | atgaagagac attttttaaa cagttaggtt agcatgccct accaagctat catttcatca |
| 77161 | ttgatcaaac ttcctcaaaa ttctaaccac tcgatgtcaa acttaaaata gaggcaaaga |
| 77221 | agatgtcaga ttttctgtaa ataagtcatt taacaaagtt ggcaaaataa tcccaacaca |
| 77281 | gtattatatc ctaattacat ttgctataat tataaagata tacagtaaat aattgatttt |
| 77341 | aaagaagtac tcccaaaaca aaaaaaactg atacttttat attaaagttt aaggagagtc |
| 77401 | agatattctg gaatttgtta aataagaatt gttaaaatgt ttcttgtaat aaatcataat |
| 77461 | tagaatctag agacacactc agcgctcttt cctaccttag gttgctttta aatgaaacac |
| 77521 | tgttgtgatt cttgatgcaa tggtttacaa aaagaagggt ggcaaaaatc tttatcattg |
| 77581 | tcaatgaaat agttaaatgt tcatactgca aatctgagtt acagtgatct ttaaaagtct |
| 77641 | gtgtctttat tttaaccaat ccatttcaag atttttcttc ccaaaaacat atgtgtgtgt |
| 77701 | atatctacat atggtaagta cttgttttct agatgttcat agaatacaaa catgaacaac |
| 77761 | tatgtccaat ttagttgagc acatgatttt tctttctttt tttttttgta gcacttgaag |
| 77821 | ggctttattt ttttttcttt ttcttttttt tattatactt taagttttag ggtacatgtg |
| 77881 | cacattgtgc aggttagtta catatgtata catgtgccat gctggtgcgc tgcacccact |
| 77941 | aactcgtcat ctagcattag gtatatctcc caatgctatc cttcccccct ccccccaccc |
| 78001 | caccacagtc cccagagtgt catattcccc ttcctgtgtc catgtgatct cattgttcaa |
| 78061 | ttcccaccta tgagtgagaa tatgcggtgt ttggtttttt gttcttgcaa tagtttactg |
| 78121 | agaatgatga tttccagttt catccatgtc cctacaaagg acatgaactc atcatttttt |
| 78181 | atggctgcat agtattccat ggtgtatatg tgccacattt tcttaatcca gtctatcatt |
| 78241 | gttggacatt tgggttggtt ccaagtcttt gctattgtga ataatgccat aataaaaata |
| 78301 | cgtgtgcatg tgtctttata gcagcatgat ttatagtcat ttgggtatat acccagtaat |
| 78361 | gggatggctg ggtcaaatgg tatttctagt tctagatccc tgaggaatcg ccacactgac |
| 78421 | ttccacaatg gttgaaccag tttacagtcc caccaacagt gtaaaagtgt tgctatttct |
| 78481 | ccacatcctc tccagcacct gttgtttcct gactttttaa tgattgccat tctaactggt |
| 78541 | gtgagatggt atctcatagt ggttttgatt tgcatttctc tgatggccag tgatgatgag |
| 78601 | cattttttca tgtgtttttt ggctgcataa atgtcttctt ttgagaagtc tctgttgatg |
| 78661 | accttcgccc actttttaat ggggttgttt gtttttttct tgtaaatttg tttgagttca |
| 78721 | ttgtagattc tggatattag ccctttgtca gatgagtagg ttgcgaacat tttctcccat |
| 78781 | tttgtaggtt gcctgttcac tctgatggta gtttcttttg ctgtgcagaa gctctttagt |
| 78841 | ttaattagat cccatttgtc aattttgtct tttgttgccg ttgcttttgg tgttttggac |
| 78901 | atgaagtcct tgcccatgcc tatgtcctga atggtaatgc ctaggttttc ttctagggtt |
| 78961 | tttatggttt taggtctaac gtttaagtct ttaatccatc ttgaattgat ttttgtataa |
| 79021 | ggtgtaagga agggatccag tttcagcttc ctacatatgg ctagccagtt ttcccagcac |
| 79081 | catttattaa atagggaatc ctttccccat tgttgttttt ctcaggtttg tcaaagatca |
| 79141 | gatagttgta ggtatgcggc gttatttctg agggctctgt tctgttccat tgatctatat |
| 79201 | ctctgtttag gtaccagtac catgctgttt tggttactgt agccttgtag tatagtttga |
| 79261 | agtcaggtag tgtgattcct ccagctttgt tcttttggct taggattgac ttggcaatgc |
| 79321 | gggctctttt ttggttccat atgaacttta aagtagtttt ttccaattct gtgaagaaag |
| 79381 | gcattggtag cttgatgggg atggcattga atctgtaaat taccttgggc agtatggcca |
| 79441 | ttttcacgat attgattctt cctacccatg agcatggaat gttcttccat ttgtttgtat |
| 79501 | cctcttttat ttccttgagc agtggtttgt agttctcctt gaagaggtcc ttcacatccc |
| 79561 | ttgtaagttg gattcctagg tcttttattc tctttgaagc aattgtgaat gggagttcac |
| 79621 | tcttgatttg gctctctgtt tgtctgttgt tggtgtataa gaatgcttgt gatttttgta |
| 79681 | cattgatttt gtatcctgag actttgctga agttgcttat cagcttaagg atattttggg |
| 79741 | ctgagacgat ggggttttct agatatacaa tcatgtcgtc tccaaacagg gacaatttga |
| 79801 | cttcctctgt tcctaattga ataccgttta tttccttctc ctgtctaatt gccctggcca |
| 79861 | gaacttccaa cactatgttg aataggagtg gtgagagagg gcatccctgt cttgtgccag |
| 79921 | ttttcaaagg gaatgcttcc agtttttgcc cattcagtat gatattggct gtgggtttgt |
| 79981 | catagatagc tcttattatt ttgaaatacg tcccatcaat acctaattta ttgagagttt |
| 80041 | ttagcatgaa gggttgttga attttgtcaa aggcttttcc tgcatctatt gggataatca |
| 80101 | tgtggttttt gtctttggct ctgtttatat gctggattac atttattgat ttgcgtatat |
| 80161 | tgaaccagcc ttgcatccca gggatgaagc ccacttgatc atggtggata agctttttga |
| 80221 | tgtgctgctg gattcggttt gccagtattt tattgaggat ttttgcatcg atgttcatcg |
| 80281 | aggatattgg tctaaaattc tcttttttgg ttgtgtctct gcccggcttt ggtatcagaa |
| 80341 | tgatgctggc ctcataaaat gagttaggga ggattccctc tttttctatt gattggaata |
| 80401 | gtttcagaag gaatggtacc agttcctcct tgtacctctg gtagaattcg gctgtgaatc |
| 80461 | catctggtcc ttgactcttt ttggttggta aactattgat tattgccaca atttcagctc |
| 80521 | ctgttattgg tctattcaga gattcaactt cttcctggtt tagtcttggg agagtgtatg |
| 80581 | tgtcgaggaa tttatccatt tcttctagat tttctagttt atttgcgtag aggtgtttgt |
| 80641 | agtattctct gatggtagtt tgtatttctg tgggatcggt ggtgatatcc cctttatcat |
| 80701 | tttttattgt gtctatttgg ttcttctctc tttttttctt tattagtctt gctagcggtc |
| 80761 | tatcaatttt gttgatcctt tcaaaaaacc agctcctgga ttcactgatc ttttgaaggg |
| 80821 | ttttttgtgt ctctatttcc ttcagttctg ctctgatttt tgttatttct tgccttctgc |
| 80881 | tagcttttga atgtgtttgc tcttgctttt ctagttcttt taattgtgat gttagggtgt |
| 80941 | caattttgga tctttcctgc tttctcttgt gggcatttag tgctataaat ttccctctac |
| 81001 | acactgcttt gaatgcatcc cagagattct ggtatgttgt gtctttgttc tcgttggttt |
| 81061 | caaagaacat ctttatttct gccttcattt cgttatgtac ccagtagtca ttcaggagca |
| 81121 | ggttgttcag tttccatgta gttgagtggt tttgagtggg attcttaatc ctgagttcta |
| 81181 | gtttgattgc actgtggtct gagagatagt ttgttataat ttctgttctt ttacatttgc |
| 81241 | tgaggagagc tttacttcca actatgtggt caattttgga ataggtgtgg tgtggtgctg |
| 81301 | aaaaaaatgt atattctgtt gatttggggt ggtgagttct gtagatgtct attaggtccg |
| 81361 | cttggtgcag agctgagttc aattcctggg tatccttgtt gactttctgt ctcgttgatc |
| 81421 | tgtctaatgt tgacagtggg gtgttaaagt ctcccattat taatgtgtgg gagtctaagt |
| 81481 | ctctttgtag gtcactcagg acttgcttta tgaatctggg tgctcctgta ttgggtgcat |
| 81541 | atatatttag gatagttagc tcttcttgtt gaattgatcc ctttaccatt atgtaatgac |
| 81601 | cttctttgtc tcttttgatc tttgttggct taaagtctgt tttatcagag actaggattg |
| 81661 | caacccctgc cttttttgtt ttccattggc ttggtagatc ttcctccatc cttttatttt |
| 81721 | gagcctatgt gtgtctctgc acgtgagatg ggtttcctga atacagcaca ctgatggatc |
| 81781 | ttgactcttt atccaatttg ccagtctgtg tcttttaatt ggagcattta gtccatttac |
| 81841 | atttaaagtt aatattgtta tgtgtgaatt tgattctgtc atcatgatgt tagctggtga |
| 81901 | ttttgctcgt tagttgatgc agtttcttcc tagtctcgat ggtctttaca ttttggcatg |
| 81961 | attttgcagt ggctggtact ggttgttcct ttccatgttt agcgcttcct tcaggagctc |
| 82021 | ttttagggca ggcctggtgg tgacaaaatc tgtcagcatt tgcttgtctg taaagtattt |
| 82081 | tatttctcct tcacttatga agctcagttt ggcctgatat gaaattctgg gttgaaaatt |
| 82141 | cttttcttta agaatgttga atattagccc ccactctctt ctggcttgta gggtttctgc |
| 82201 | cgagagatcc gctgttagtc tgatgggctt ccctttgagg gtaacccgac ctttctctct |
| 82261 | ggctgccctt aacatttttt ccttcatttc aactttggtg aatctgacaa ttatgtgtct |
| 82321 | tggagttgct cttctcgagg agtatctttg tggcgttctc tgtatttcct gaatctgaac |
| 82381 | gttggcctgc cttgctagat tggggaagtt ctcctggata atatcctgca gagtgttttc |
| 82441 | caacttggtt ccattctcct catcactttc aggtacacca atcagaccta gatttggtct |
| 82501 | tttcatatag tcccatattt cttggaggct ttgctcattt ctttttattc ttttttctct |
| 82561 | aaacttccct tctcgcttca tttcattcat ttcatcttcc atcactgata ccctttcttc |
| 82621 | cagttgatcg catcggctcc tgaggcttct gcattcctca catagttctc gagccttggt |
| 82681 | tttcagctcc atcagctcct ttaagcactt ctctgtattg gttattctag ttatacattc |
| 82741 | ttctaaattt ttttcaaagt ttttaacttc tttgcctttg gtttgaatgt cctcccgtag |
| 82801 | ctcagagtaa tttgatcatc tgaagccttc ttctctcagc tcgtcaaagt cattctccat |
| 82861 | ccagctttgt tctgttgctg gtgaggaact gtgttccttt ggaggaggag agatgctctg |
| 82921 | cgttttagag tttccagttt ttctgttctg ttttttcccc atctttgtgg ttttatctac |
| 82981 | ttttggtctt tgatgatagt gatgtacaga tgggttttca gtgtggatgt cctttctgtt |
| 83041 | tgttagtttt ccttctaaca gacaggaccc tcagctgcag gtctgttgga ataccctgct |
| 83101 | gtgtgaggtg gcagtgtgcc cctgctgggg gatgcctccc agttagactt ctcgggggtc |
| 83161 | aggggtcagg gacccacttg aggaggcagt ctgcccattc tcagatctcc agctgcgtgc |
| 83221 | tgggagaacc actgctctct tcaaagctgt cagacagggg catttaagtc tgcagaggtt |
| 83281 | actgctgtct ttttgtttgt ctgtgccctg cccccagagg tggggcctac agtggcaggc |
| 83341 | aggcctcctt gagctgtggt gggctccacc cagttcgagt ttccaggctg ctttgtttac |
| 83401 | ctaagcaagc ctgggcaatg gcgggcgccc ctcccccagc cctcctgggg ccttgcagtt |
| 83461 | tgatctcaga ctgctgtgct agcaatcagc gagattccgt gggcgtagga ccctccgagc |
| 83521 | caggtgtggg atatagtctc gtggtgcgct gctttttaag ccggtctgaa aagtgcaata |
| 83581 | ttcgggtggg agtgacccga ttttccaggt gcgtctgtca cccgtttctt tgactcggaa |
| 83641 | agggaactcc ctgacccctt gtgcttccca ggtgaggcaa tgcctcgccc tgcttcggct |
| 83701 | cgcgcacggt gcgcgcaccc actggcctgc gcccactgtc tggcactccc tagtgagatg |
| 83761 | cacccggtac ctcagatgga aatgcagaaa tcacccatct tctgcgtcgc tcacgctggg |
| 83821 | agctgtagac cggagctgtt cctattcagc catcttggct cctccccatg atttttcttt |
| 83881 | ataataacaa ttaacctaac ataaacgaag actggaactc ctatctcctg tttccatgtt |
| 83941 | cagtgcttgt ttcaagtatt ccagtaagaa aaagtaaatt tggaattgat atggtaaaaa |
| 84001 | attgttttaa tttggccata aagttaatgg tgtgttttgt cacaagcaac tcccttaaag |
| 84061 | aatgtttctg aagccccttc cttagtctat caggccaaca tattcctgta aaacaattaa |
| 84121 | ttttatcaat attttatata gaaaataagg tgatttttaa atgggaaaac agatttccac |
| 84181 | aaggattaca tttttaaagt acataaaata ttaactagat tttatgatta tgtattaatt |
| 84241 | gttaacatgg taaatatgtt tttaaagaat gaccaaaacc attttttgta gaagaattta |
| 84301 | tttgctttag aatacccata aattaccatt tttataccac atagagtaag gatttacaga |
| 84361 | tcttagccct gtgaggttat cagaaaagca ataagtatat tttttatatt tttgatgtgc |
| 84421 | tgtttcagaa attatcaccc ttaacataaa ttatgaaatg cattgaatac aaatggaaaa |
| 84481 | atggcattta ataagaatta tttgacagta aatcacctga tataattcta aattgactac |
| 84541 | ataaaagtag agttatattg taagaagttc aattttataa gtagggcatg atgtccagat |
| 84601 | aatgtacaaa tgtgatatta ctaaggtatt caataaatag tattataata gaataaaaca |
| 84661 | aagtaaatat gaatagtaaa aatgagtatc tgaaatccta agattgaaaa tttttccaat |
| 84721 | taatattatc aattagctaa taacttatat ttcaagcact tctcttactt tagcttcctt |
| 84781 | tgttagggaa ctttctaaaa cgataatgcc ttgaacataa tatatgaaaa gggcaatttt |
| 84841 | tgggcctctc atttgcacag gccccttata agactaatcc ttttctgcgt attgtgggtc |
| 84901 | aaaattatga acagaattta tgccatccat atttaagcct tcagaactta ctaagtggaa |
| 84961 | tcataaggaa ctatttaatg gcctcatcca attgtttcct ttgaatgact atatcttctg |
| 85021 | tttatgtttt cttctatcat tgattgcttt ttgttactat gaatgtgatt tccagagcca |
| 85081 | acacctcata gtttctgact tgctttgtac tctgctctag gccttatatc caatactttg |
| 85141 | tgcaaaaatt ttctgacctc tctttgcaat ttaaagaaca tcagtgttta tctctaaatt |
| 85201 | attagctatg ttcttaaaga caatattgcc taatagcaat gtcgttatag aatagttcca |
| 85261 | ggagaggctt ttatcatgca cgccaaacag ctgtttaggc acaatgttga gtaggcttgt |
| 85321 | gtggctttat attagcttcg taggaaagaa ttttgtgatc agttagtaat gtctgcaaca |
| 85381 | gatgcacaat aaggaaattg aagcacatat gccatgtgtt aagcatcatt atattaaact |
| 85441 | gtggttccca aacttgaata ttcgtaacgc agggaactta caaaaataca tatccctcct |
| 85501 | ccctactcat tgatctacaa gattctgagt ccacaggtct gggctgatat cataaaaaac |
| 85561 | accagtggta attgtaatca aggatgggat tatattttga gaaatactaa tgtagaatat |
| 85621 | actaaaaagt ctcttgtgag ttactaagtc caaatgtaag agtaaaatac taacatgttt |
| 85681 | cagttttatg acacaaatta gaataggatc aaattcacca aaagattatt ccacacctgt |
| 85741 | ttgttaactt gggggtcatt cacctgagaa tactcagaga aagaaaagtg ctcatcttta |
| 85801 | tttctttgcc ccatgtaatt ttcctgcaaa ggccatggga aattacagta agtggcacat |
| 85861 | gcagtctcct agtagaggga gaagaattct gcccctcatc atctgtggga gaactgaaat |
| 85921 | tgtatgctgc tattacctgg ggagtagtac ccatggaaag tactaattat agttctttgt |
| 85981 | gattaaattt gttgttaaaa gaattttttt ctaaaaacaa gtataaggaa atacatatgt |
| 86041 | atatatatat atacacacac acacacacac acacacaaac atatgataga gttctgaatc |
| 86101 | tagattttca tggttatgtt tctaattgtt ttgtttcttt aaaaatgttt ttaggggcca |
| 86161 | gggacagagg ctcatgcatg taatcctagc actttgggag gccaaggcgg gaggatcacc |
| 86221 | tgagcctggg agttcaagac cagcctgacc aacatagaga aaccccgtct ctactaaaaa |
| 86281 | tacaaaagca gctgggtgtg gtggcacatg cctgtaatcc cagctactca ggaggctgag |
| 86341 | gcaagagaat cacctgaacc catgaggcac aggttgcagt aagcagaggt agcaccattg |
| 86401 | cactccagcc tgggcaacga gagtgaaact ttgtccccca cccccccaaa aaaagaaaaa |
| 86461 | gaaaaatgtt tttagggtat tttttatttg aaaatgttct tttcctctca aaagtccttg |
| 86521 | tcagattctg gtaacaggaa atatgaataa gtgacttaat aaacaattgt aactaacatc |
| 86581 | tgttttaatt ataaatgagc ataggaagag gaattataag ccaaaacaca tccaaaatat |
| 86641 | gaagctggca aattaagtaa aaggctattt gtacactgac actagcacat tgctagtgtt |
| 86701 | ataataaggg acatggaata tccaaaggct gtttgaagca tgctataaat ctattcacta |
| 86761 | ttataatcta tctttactta caaataaaaa aatggagaga catgtaacat atatattaat |
| 86821 | atgtgtagca atggcagaat tttcattaag ctgttgaagg ttaatctttg gggtgttcca |
| 86881 | tttgcacagg cctcttacaa gactaatttt ttactggtaa ttttattttt tgtaaatagc |
| 86941 | acccaccttc agttgtatga tattctgacc tcaaaaatgc tggatttgat tctctcagcc |
| 87001 | tgtgatagta ttttgaaaat gagaagaggc cttggagatc atgtaatttg gcatctctat |
| 87061 | tttaaagctg aaaaatatta aagtcctttt caatttggta aataattata aacaaagaag |
| 87121 | ctgatacaaa cagcctacac gaacagaaat atagaatcta cttaagagaa atttaaggac |
| 87181 | actgtactct gttctgtaag accaaatcgg gaaagatact ttcacttctg tatataacac |
| 87241 | tacatacaat ggaagttaag aagaggcaat caagcttata tgaggtaaga aaacctgcca |
| 87301 | cttaaagcat agctgaaaaa acttttgata tttaaattta aaaaggaaga tagaagtaat |
| 87361 | ccctgccccc atgctagcat tttggtcttt tggtctctct tactctgcag ctattatcac |
| 87421 | cttcttctag tattctgcac cttttaatgt aagtatcatg gtaataagaa tttttatctg |
| 87481 | ttttgtttac taatatatct ctggagacaa aaagtaccca gtacatagta ggtactcaaa |
| 87541 | aatatttatg ttataaatga atgtctattt tatgtccaga gttttgtaca cacataatat |
| 87601 | aaagaatgaa aaaaataaaa tattcgaaga aacgacagct gagaaattcc agtaattgaa |
| 87661 | taaaggttgg aatctaggaa acaatgactc tcaaggaaga taaataaaaa gaaatccatg |
| 87721 | cctagtctcg tagtagagaa acagcagata atcaaagacc aaaaaaaaaa atcccaaatg |
| 87781 | aaggaaaaga gcagattatc tcctaaaatg actattacac tgacaactct ttatttacca |
| 87841 | gcaatactgt aaacaaaaag caagtagaat aatatcttta agatgccaaa aataaaataa |
| 87901 | atttcaatgt aaaattctat atctaactaa actatatttc aggtaaggga acctcaatta |
| 87961 | aaaataagag ttttattatc aaggactcca ctaaagatac ttccaaaata cgtacttcgg |
| 88021 | gagaaaaaaa taataatctc aaaataaaag gtcaaaatgt aagaagtagt ggtaagccaa |
| 88081 | acaaatggca atcataaggg tgaatctaaa caaactacct ttatgcaaaa aaatcataat |
| 88141 | attgtcaatt tatgagccta aaaagaaaac taaaatactg aacatcgata gcatatttaa |
| 88201 | gtcaggacaa caactatcta aatgaacatg tgccaagatc cttttatgtt gagaagaaag |
| 88261 | attaaaagaa tcatcttaat taaaatagca ttgtatacaa aattgagctt taaatacgac |
| 88321 | tccaaaataa ataccaatag ggatcttttt ttaaagttag taagccaatL ctaaaatctt |
| 88381 | aatagaagag caatggtgca ttaagagtca agataattct gaagatgaca aaaatgaaag |
| 88441 | gtatttacct tacctaatat aagtgcagag catacattta tattcattaa gaaagggtgt |
| 88501 | tcatggtgca gagatagaca aacaaaccag tggaacagaa tatacagccc aggacttaac |
| 88561 | atccccctgc aaatatgtgg aaacttatta gagagacaga attatagatc tgtgaagaaa |
| 88621 | gagtaagtta gtcaataaat gaaactggaa taaagtaggt ccttctttca cacatacaca |
| 88681 | aaaaaatcaa ttccatgtgg actaatggtt taaatgtaag agactaaact ttaaaatatt |
| 88741 | tccagtaaag ttatagcaca atataatgtt ataaaaggat tcttaagaca taaaacatat |
| 88801 | aaattatagg aaaagacaga ttgccaactt ctaaaactat tataaaataa aatgggaaaa |
| 88861 | taatccaaat acaagaagat atttgcaaca cataaaactc acaaaaatta ggtgccaaat |
| 88921 | tatataagga atgtctacta atcaacagaa aaaaaaagca caatagaaaa aaatgtgttc |
| 88981 | attctttgtt tataaaaaag atattttacc aagggaaaat aatagtggcc aatgaacaca |
| 89041 | ggaaaagatc cttagcctcc cttgtagaca aggaaatgta aattaaacct ccagtgaaat |
| 89101 | agtattttat atccaaggga ttggtaacaa atttaaaaat aaatatgaca atggcaaaag |
| 89161 | ttgatgagga tgtggagcag acagctacat actactctag aaatcaattt gatgttacac |
| 89221 | agcaaagttt aaaatgtgta tgcctatgac ccctggcatt gttattaaga aaaccttgca |
| 89281 | catgtgctct tataagcata tatttatagt accatggttt ataaaagaaa aaaaaaaaca |
| 89341 | gtaaaatccg tatatattcc aaagtctact tataggataa tgggttagtt atagatactc |
| 89401 | atagactgaa atactattca gcaatgaaaa tgagttaact atgtccagtc catgaacagg |
| 89461 | aataaatcta aaaaatataa tgttaatttt ttaaaaagtg agtcacaaga taacgatgac |
| 89521 | agtatggtat gtaaaataaa taaaactaaa ccatagattg cttaaggata aatatgcagg |
| 89581 | tagtaaaaac ataaggaaag tcacagagat agtaaaaaga aatatttaga actgtggcta |
| 89641 | actctgtgtg gaaaaggaag gttgtggtag gtggagcaca taaaaatatt tgaaagtatt |
| 89701 | ggtaatggtc tattttttaa cctgagtggt agcatatgtg tgtctattta ttaatcttct |
| 89761 | tcaaaagcta tgcatttcat attaactcac ttgtttaata taaaatattt tataatttct |
| 89821 | taagtaaaaa tgtcagctat gataaaattc attacatctc cccctccttc caaattatcc |
| 89881 | caacagttaa atgttgattc atttgtagag cattaaaaac acatttgatt gaataaaatt |
| 89941 | caattaacat atatgtagga gttcagtcag ggtggcggga aaagttgtaa gaaaaagtta |
| 90001 | tagggaaaga ctcaaacctt cttggaaggc caggaggttt tgcaaaagct tcgaaggaga |
| 90061 | aatggctgaa ggcagccaaa ttctgttatc cagaacctga aggcaaaggg tagataacaa |
| 90121 | gggaatgtaa aggaacttat ctagataagt tggtttactt atgtctctag aaaccaacct |
| 90181 | ttgatcattc ctgcacagga ctgctctcta ctcagggggt tggcaaagtt aattacccac |
| 90241 | aaattgtgtt tgctccaatc ctttgtcatt aaatctgtac taaataaatg caagtgtcac |
| 90301 | aggcttatgg gggctgcact ctgggttgca ctgcactttc attggcagtg ctaaggggtg |
| 90361 | cagtccatct agccatgctg tcaggcaaaa tacctgtgtc agagtacttt tgtcatccat |
| 90421 | cactcagcca gagtctgcgg gacagacttg gcacatatac ttaaaatacc tactaaaaac |
| 90481 | aatgtgttaa acctttttag gcccaaaaga taaaagatat aatatctttt taacatttta |
| 90541 | agttttgttc ttgagttagt tcatatatta agaagacgtg tctggggagg cagagcagga |
| 90601 | tggcaaaata gaaggctcca ccaatcatcc cccctgaaag gaccccaatt taacaactac |
| 90661 | ctacaccaaa aagcaccttc ataaggacca aaaatcagat gaccactcac agtatctggt |
| 90721 | tttaattcca cattgctgaa agaagcactg aagaggcagg agaaactgtc tttaattgcc |
| 90781 | agcgccaccc cttccccatc ctccagcaac aattccgtgt gctggggaga gggagagcat |
| 90841 | agcatttgtg aggaaatgaa ctcagtgctg cccttgttat agcagaaagt aaaaacaaac |
| 90901 | caaattcagc tgacacctgc ccacggaagg agcatttaaa ccagccctgg ccagagggga |
| 90961 | atcgccaatc ccagcagtca gaacttgaga tcccacaagc cttaccactg caggctaaac |
| 91021 | tgctctgagg ctgagaataa acttgaaagg caggtcactg cctttctagg tcactaggac |
| 91081 | tgcaactcct aggaaagtcc tagtcctgaa ctgggcccag agtcaatgga cttttggggc |
| 91141 | atgtgaccta ctgagatacc agccagggca gctaaggggg tgctggcatc acccctcctc |
| 91201 | tacccccatg gtgcatagct catggctcca aaagagacct cttccatcca catgaggaga |
| 91261 | ggaaaggaaa gagtgaaaag aactttgtct tgcattttgg atatcagctc aaccacagta |
| 91321 | ggctagggca ccagtcagag ttgtgaggcc tcccttccag gccccagttc ccagatgata |
| 91381 | tttctagaca caccctggga cagaagggaa cccatggcct taaacagaaa gacccagtca |
| 91441 | tatcaggatt catcacctgc taactgaaga gtccttggtc cctgaataac cagcagcata |
| 91501 | cccaggtact atgctgaggg ccttgggtga aactctgaga cttgctggcc tcaggtgaga |
| 91561 | ctcagcacat tcccagttgt ggtgactatg gggcgagaca aaaaagcaga gggaaagtaa |
| 91621 | aggggacttt gtcttgtacc ttaggtacca gcttggccac agtgtgggta gagtgccaag |
| 91681 | caggctcttg agttaccaat ttcaagattt ggctcttgga ccgcctttct gggccactca |
| 91741 | acttggaaaa gaagaagtca agtaactctt gtttgcagat gatatgatgt tatgcttgca |
| 91801 | aaagcaaaga ctccatcaaa aaactattca aattgataaa ttcagtaaag ttgcaggatt |
| 91861 | caaaatcaac atacaaaaat cagtagcatt tctatatgac agcagtgaac aatctgaaga |
| 91921 | agaaatcaaa agtgtaatcc catttataat atctacaaat aaaataaaat acctaagaag |
| 91981 | taacttaagc aaacaagtga aagatctcta caataaaaac tataaaacac tgataaaaaa |
| 92041 | attgaatagg aaacaaaaaa ttgaaagata ttacatattc attgattgga aaaaccaata |
| 92101 | ttgttaaaat gtccatacta cccaaagcaa tctacagatt caatgcagtc cctatcaaaa |
| 92161 | tacgaatggt gttcttcaca gatagaaaac acaatcctga agtttatatg gaaccacaaa |
| 92221 | agacccagaa cagccaaagc tatcctaagc aaaaagaaca aaattggagg aaatcacatt |
| 92281 | acctgacttc aaattatact acagaactat agtaaccaaa cagcatgata ctggcataaa |
| 92341 | aacagacaca tagatcaata gaacagaaga tagaacccag aaacaaatcc acacacctac |
| 92401 | agtgaactca ttttcaacaa aggtgccaag aacatacact ggggaaaaga cagtcccttc |
| 92461 | aataaatggt gtggaaaaac tggatatcca catgcagaag aataaaacta gatccctatc |
| 92521 | tctcaccata tacaaagatc caatcaagat gaattaaaga cataaatata aggcttcaaa |
| 92581 | ttatcaatct tctttaagaa atcactgggg aaattttcta ggacagtggt cagggcaaaa |
| 92641 | atttattgag taatacctcc caaacacaag caaccaaagt aaaaatggac aaatgggatc |
| 92701 | atatcaagct aaaaacttct gcacagcaaa gaaaacaatc aacaaagtga agagacaacc |
| 92761 | tacagaatga gagaaaatat ttgcaaacta ctcatctgac aaggaattaa taaccagaat |
| 92821 | atataaggag ctcaaacaac tctataggaa aaaaatctaa taatccgatt aaaaatgggc |
| 92881 | aaaagattta aatagacatc tctcagaaga agatatgcaa ataacaaaca ggcatatgaa |
| 92941 | aaagtgctca acatcactga tcatcagaga aatgcaaatc aaaactacaa tgagatatca |
| 93001 | tctcaccccg gttaaaagag cttatatcca aaaacaggca acaacaaatg ctggtgaaga |
| 93061 | tgtggagaaa agggaacact tgcacattcc tggaagtgta aattatcata ataactagga |
| 93121 | gaacagttct gtggttcctc aaaaaactaa aaatagagct accatatgat ctggcaatcc |
| 93181 | cactgctggg tatataaaca aaagaaagga aatcagtata tcgaagagat atctgcactg |
| 93241 | ccgtgtttgt tgcagcactg ttgacgatag ccaagatttg gaagcaacct aagcatccat |
| 93301 | caacagatga atggataaag aaaatgtggt acatttaaaa atgttaagtg aaataagcga |
| 93361 | ggcacagaaa gacaaacact gcatgttctc atttacaagt gggagatgaa caatgagaac |
| 93421 | acatggacac agggagggga ataatacaca ctggggcctg tcaggggagc tgggtgggtg |
| 93481 | gagggagagc attaggaaaa ctagctaatg catgctgggc ttaataccta ggtaatgggt |
| 93541 | ggataggtgc agcaaaccac cacggtacac gtttacctgt gtaacaaacc tgcatatcct |
| 93601 | gcacatgtac cctggaactt aaaattaaaa ttaatttaaa aaatcaaaac aattgaactc |
| 93661 | atcgagatag acagtagaag gatggttacc agaggctgga aaggatagca gaggaggtgg |
| 93721 | tgggtgggga tggttaacgg ctaaaataaa aagttagaaa gaattaataa gatctagtat |
| 93781 | ttggtagcac aacagggtga ctacagtaaa taataattta attgtacatt ttaaaataac |
| 93841 | taaaagagta taattgaatt gtttgtaaca caaaggataa atacttgagg gagtggatat |
| 93901 | tccatcttcc atgatgtgat tattatgcat tgcatgcctg tatcaaaaca tctcatgtgc |
| 93961 | cccataaata tacacagcta ttatgtaccc agaaaaatta aaaattaaaa aaagtcatgc |
| 94021 | atagctcata ttccaagagc ttttagaaat cattgttttg agaatgcttt tatataaatg |
| 94081 | aggatatatt gactaaaaat aacataactc cttataatgt actatatagg tatacattat |
| 94141 | aatatggcat atctccagct ctattttaat gtctctattt aatagattta ggtataattt |
| 94201 | tattgtattt tcagtaactc atttctaata acagaatttt ttaaatcagt aatgtcttat |
| 94261 | acattaagag gttaattatt tgatattcag tgttcaaaat ttgtttgctt taagactgat |
| 94321 | ttaaaacttt aaccaacatg tttgaaatca ttgagaccac agcccacgat cagaagacat |
| 94381 | actttagaaa atgattccta tttgtcctcc aagaaattta caaatatgtc cccatacaag |
| 94441 | agctccataa aggacttcat atccaaatat caagggcttt gaacaggata ctgccacatt |
| 94501 | acccgagccc taaagcattg tttacaagga attttgacac ccaagttaaa aaatgacaca |
| 94561 | cgagcaactt ttcccaagaa actattctaa aaaatgttaa attgtatttg gtaattcagt |
| 94621 | tgtagaaatc tgttttaatt tttcttaata gaaacataac aaagatcata aaaacactca |
| 94681 | ttttaattta caggtggcaa atattcattt tagtcaccaa ttattcaacc acaatgaact |
| 94741 | tctggaaaag caaagagtac taagttaaca aattgagtct attttcatca aattatctaa |
| 94801 | aatcagccaa aacttaaaga caatttcata ttcatgccca aaggccaaac acaagtttat |
| 94861 | aattcattgg gaataaaaga agtcctgttt tttaaaatcc ctcctgattt ttaagaaatc |
| 94921 | tgaaggaatt cagtttttat aaagccagct agtttcaaat agcattaatg ttgatgtggt |
| 94981 | aaattataga cgtcatttaa taaaatgtat atttagaaga caaaacagca ctatagacag |
| 95041 | aaagactttt taaaatgtgt gtcaaacaga agattagaaa aaagttttta gtaagaataa |
| 95101 | tcagaagtaa aaacagtgta actattttta actgaagtat tttaagtcct ttcttccaac |
| 95161 | aaaaattgag tgcctaatac agccatttcc agaacttttt cttttaatat gtagagagaa |
| 95221 | tatatgtatg aagccatata tatatattca tatatgtaaa accagataca aatattaatc |
| 95281 | ctcaagtgtg tatattacat tatagacatt tgataaaaaa ttataatgta gatattagaa |
| 95341 | acaacgcaaa tggctaatca taatatggta tggatgcact atattagtaa ttagatttag |
| 95401 | tctaattaca cattaaaacc ccattattat aggctcaatt ttatttttga agtgttttat |
| 95461 | taaagcagag gttttacctt tagtaggatg aagacataaa actttcataa gtgactaagt |
| 95521 | gtagagggat atttaacagg acccatgaca catccatata ctaatcacta atcgcacact |
| 95581 | attcatatct atttaatact gcagaacctc tggaatcttt ttgtttgttt gtctgtttgt |
| 95641 | ttagagacag ggtctcactc tgttgcctac ctaggctgca gtgcagcagc acgatcactg |
| 95701 | ctcactgcag ctttgacact gggggctcaa gctatcctcc cagctagttt ctttgttgct |
| 95761 | gagactacag ggactttcac cgtgcccggc taaatttttt atttttgttt tttgtagaga |
| 95821 | caagggtctt gctctcttgc ctaggctggt ctcaaactcc tgggctcaag tgatccttcc |
| 95881 | acttcagcct tccaaagtgt tgggggttac aggcatgagc taccacatct ggtcttgatc |
| 95941 | tttacttgtt aattatttgc tgcttaagag agaatcactt ttacttattc aagtgatttc |
| 96001 | aatgtatttc ttcagatatt ttatataacc attattaatg aggttttaat tattgcactt |
| 96061 | gttaataata tgcagaaaat aagagaagga attagagcta ttattcccat aaatggagtg |
| 96121 | aataagaaaa ataattttag aaaaacttga tcaattgtaa aatgaaattc acatccatgc |
| 96181 | tctctgaata tatgttaaaa taaaccaatt agtatttgtg gaggaacatg aatctgataa |
| 96241 | aaatttccat gccaaatgaa tatttctcat tatatcaaag tataaatctt cagtcttaga |
| 96301 | actgaaagac tttatttatt atctagctat gaatatatct tcattttgaa acatctacaa |
| 96361 | caaaaacaag aaagaagagt actcaatgtt atcagtttgg tagaactgaa ttaaggcaga |
| 96421 | ccttttgata tcaggttgac tctttcatat ttgttactgt attatccaca taaggtctta |
| 96481 | ctaggagaca aagttactct gccataatgc caacttgtaa atatttgaca ttgagtctca |
| 96541 | tagaaactct ctaaggacag tgaacaaata ccataagcag tactgcattt gagacaaaag |
| 96601 | ggaattaatt gagagtgaca cccatagata ccactggctg ctaagaagga tacgatcagt |
| 96661 | gccaggaaac agcactgcac cttttatcat ttctcccatg atgcacccta ctgaccacat |
| 96721 | gtcaactgaa aacaaaaatg aaatgaagat aaacaagaac acaggaatag aacaacaaat |
| 96781 | aaatgaaaac actgggctac tcatgccata gagcaatagt ctgacttttc actgactgga |
| 96841 | tgagaggcca gtggcatgat cattagcatt ttaaatggtg gaaaggggag aacataggct |
| 96901 | ctcaaggccc ttttctgtca tataacagaa ataacaacac tacccaatgc tacctaatgt |
| 96961 | agaataatat tactttgcaa ttataactca atgattaatt taggttttga tttaaaaggt |
| 97021 | ctaatttgca ttcatttact agaatcctac tgatttttat cataaattat tctagatagt |
| 97081 | gttaatatgc aaatcagttt cttttttact cttgtatacg tatttgaaaa aagaaaaaag |
| 97141 | aaaagctgag ctgccagcaa cctcaaaaga gtttctttta taaaacacat ttacccttat |
| 97201 | ttataaatat aaatacagtt ccagaagtga aaagccagtt caagaatgaa tgtttcagaa |
| 97261 | tatgttgtct tagtgtcatt gactctcatc aaaggagcat gtttctcagc aggaagcctt |
| 97321 | gtcttattct tataaacaca gttgccttat aatgataaga aaagctggct ttcaaaatgg |
| 97381 | gatcgctcaa tgtgaaataa acaacatgac taaagagctg atacttcttc tgaaactgtg |
| 97441 | aatcaaaaga aacctggaat tcaaggtgga attataatgg tctctctgtt attgccaagt |
| 97501 | atcatccaga acttaaaacc aggaagccag ggcagagcgc acagagggag gggcaaaatg |
| 97561 | gggaagggtg aagcaagaaa gtgaaatctc tctcttgagc tacacttggt tactcacttg |
| 97621 | ttgtacttaa aaatcagaaa gagagggcat tcttgtgggg ggaaaaataa acagaagaat |
| 97681 | tagggatgct gggggggagc aaatagggaa aggcattaag atagcagcac aatataattt |
| 97741 | tgctccactt acttttcaaa ttacatcttg taatttggca gtgaccttaa agagatcctc |
| 97801 | atgagattca ttccaatgtg aaaatctcac tcgggttaaa ctcaaagttt ccattgtttg |
| 97861 | atttaacacc taaacaaagt gatcactgca aagaaacggt tacggctttg aaggtgataa |
| 97921 | gcatacccaa agaagcaaat ttgttttgct tccagtttag gaaagcaact gacatgcaga |
| 97981 | aatatcaggg aaagatagag caaacagttg tgcatccctt tattattaac gtgtttgtaa |
| 98041 | tttcaagtaa tatctgtctc acaacaggat ggtattgaga aatctttgat taaagaaaaa |
| 98101 | aacggaaaac atatttattt ttaaattcca agtattccta tcatactgtc caaagagacc |
| 98161 | agtttgacta aattgctatt tatggattat ctatatttta tagatattgt ggaagagata |
| 98221 | tacaaaaaac attgagacca aaaatctcaa tatgcagtgt tttctcttgc ctgtctccat |
| 98281 | tcaaatgttt agaaaaaaaa tggtttctgc cattaacctg tctgggactt aggaaacatc |
| 98341 | tatttctatt tctcatttag tataaaattg ttttttacaa tatctctggc aatatattca |
| 98401 | tctttttctg ctagagaacc aattctatta ctttccaact atgtgacctt ggccaggtta |
| 98461 | cttctctcta aacctcaatt ttatccccta aaatattgat gataagctgt atttattatg |
| 98521 | tagagtttta taaaagactt gaaaaagtta tgtctgataa agatccttgc acaactgcct |
| 98581 | ggtacatagc aagtccccaa taaatattat ttacatatca aatcatcatg tattaaataa |
| 98641 | tatattaaaa ttatatttgg gaattaaata tctttggaaa aggtttattt attttaaatt |
| 98701 | tacataatta tattatatat ttacatctat aataaagaaa tctttccagt ggaggaatct |
| 98761 | caccactcac taggcaatct attttattgt tgaaaccact tagaaaggca tcctacatat |
| 98821 | tgactcacat tgactctatg gaacttctct tcactatgta aacaggaact actgtgtttc |
| 98881 | ctcatccaaa taagaacctt aaagtatgta actataacct gtaatcccta accattcctc |
| 98941 | tcctaaaact ggccaatttt atctttcagg ctaaaatccc ttgatttttt tttttttttt |
| 99001 | tttttttttt tttgctgttc ttcacatgcc tttaaacaac agcaacaaca ataacaacag |
| 99061 | atggcctaaa ttaaattctg gtctctatgt tgctttagca ccagttggtt ctatacagtt |
| 99121 | gttaattttt ttttttcttt gagccagtgt ctagctctgt cactagactg gattgcagtg |
| 99181 | gcacgatctt ggctcactgc aacctctgcc ccctgggttc aagtgattct cttgcatcag |
| 99241 | cctccctagt agctgagatt acaggcacac gccaccacgc ccagctaatt tttgtatttt |
| 99301 | tagtagaggt ggggtttcac catgttggcc aggatggtct tgatctcctg accttgtgat |
| 99361 | ctgcccacct cggcctccca aagtgctggg attacaggca tgagacacca tgcctggccc |
| 99421 | agttgttgat ttaataactg gtattaataa ctggtatatc tcacagttct ctttttggtg |
| 99481 | tgggggatct gggagatact ccaatgtaaa agaagaatat ttatttaaaa tatatatctt |
| 99541 | catgggcaga actcaaaata gatttaatag atcacaaatc ttttgcataa aaataatgca |
| 99601 | gagatgtagg ctctagatct gaaattctga tgtacatatt gaatttcatt ttctttattt |
| 99661 | taatatatct ttatgggtga taatatcctg gaaatctttc taattcccat tttaacttta |
| 99721 | ctcaccattc actattccta gagaatattt atatctatgc taccaaaatg ctaagccttg |
| 99781 | tgcctagaaa tgataagctc tgttatcttg aattacaaaa attgaatata tgcacataaa |
| 99841 | tttatataga tttttatgta ttcaagacag gattatggct caagataaac tcattgtacc |
| 99901 | aaacttcatg aatttgccat ctccactaac agaaaatgta taataaaaga atttgatacc |
| 99961 | aactcttatt gaacaggaag gtagtagtag taagccttcc ctctactaat atctctatat |
| 100021 | taggatacat aaacatacta atacaatatg tatctgaata tattagtgat atatatatat |
| 100081 | atatattgct aatgaagtta agaatagatt attttatgaa attgtcaggt attacaatga |
| 100141 | atagggactg tgcatagacc ttagaagtaa ttagcaaatt caatcactgt tggaaactgc |
| 100201 | attttatgct ttctgaaaca atctgataca gcatctgggt ctctgtaaga gttctgtaca |
| 100261 | ctaatgctgc caaggtagaa ttctgttggc ttttaaaatt ctgattcatc acattctttc |
| 100321 | atcatcattc tatcattccc ataggcagaa ggcagattca cttgcaactg taacaatcag |
| 100381 | atgctgagtc actttcctta gaagaaatgt tgagtaaatt ttggtgttac caaaatatga |
| 100441 | ttaattttca gagtgagaac ctctgaaaat ctcatgtcac attatttgtc agaaattagc |
| 100501 | ttataataaa ttatctttct tctacttcta accaagagat agaaattata caatgtaagc |
| 100561 | cctggaagtt aaatctaaat aaataaagaa ctatattgct acttccacac tccatctaat |
| 100621 | agcttaaatt atgatccaca attaaataat tttgagacta tgtgagcttc tatcctggaa |
| 100681 | aatgtttcct ctctggggga ttacgtaact cttttatcac aatttctgag acttctcctt |
| 100741 | aacacaccta agtatatttt catttagtgt agaatttaga caaattttct ctcaatgaat |
| 100801 | gactcaacac acaatagcaa gaagatttaa tatagttttc taaaatcaga acatttcttt |
| 100861 | gaaaattatt tgttataatt tttataaaaa ttataagtta taaagttagc agttataaaa |
| 100921 | ttagaacatt tcttttaaaa ttagttaact aagtcataaa tttagttgtt taacaaaagg |
| 100981 | accttgtact aaacttcagt tcaaagacag aattctaaaa gaccactgat atacataaat |
| 101041 | aaactaagaa tgtacatatt ttgcacatgt gaatctaagt aagaaaaata agcaacaatt |
| 101101 | cgcagaactt aatgctaaat attgtaatgc caggaaatca gaaaaagact ttctccttga |
| 101161 | atctacctat taaacttgct tttatttctt tacaacctca gaatctccag ctcccattct |
| 101221 | ggtgaaccct gcctcacatt ttcataaaat aataacaaaa gagaagagtt agcaggcaca |
| 101281 | ctagtggtaa aaatgtattc ttttaaacaa attcaaataa taattttatt tttaaatatt |
| 101341 | tatttataat tacatgcaat ttgcttatag atttgaaaga atgcctacta aattgtttca |
| 101401 | tcctaacttt atttaaaacc ataaatttta tattgtttga aataactctg tattgtctta |
| 101461 | attctaagaa aaagagttag actatatagt aagttgttag ttgcaaaagt ttattaggaa |
| 101521 | ttaagcacta ttatttcaaa gaggtaagaa gaattttaaa atatctctgt gctagattga |
| 101581 | tataacaatc tgtaaccaca aatttttgtt cattttactt tgatccttcc taatgttcat |
| 101641 | attcaaactt taaaaagata cagcattcag ttaatttgag ggtgtttttc ttatttcttc |
| 101701 | aaatatactt ttggaaaacc atttacctat tccttaataa cttggctcct tggcaaggtt |
| 101761 | atatgtatat ctctttcatt ctaactgcaa tttcctgttc ttcagaggga aaggcaagag |
| 101821 | gagctatttt agcagtccag ctgttagctt tggatataat atacttgagg tccagaattt |
| 101881 | tcaaatgcat gcagtatgcc tgtctttaac tttatatcca gagaatattg gccaagaact |
| 101941 | tagataaagg gacatcacag ggtttgctca aagaaggtgc tatcatttga agtagaatgg |
| 102001 | aaaaaataag gttgaagaat gtatctaaaa gaagcaggtt tgaggaaagg actcatgaaa |
| 102061 | attatactgg gactatagga gtctttgata atcaacaaga tggcatgtcc tggttggggt |
| 102121 | ttggggtggt ggaggcagtg aatgactgga tagttcttag aaaaaacttc taaggaagca |
| 102181 | ttgtaaagct gctttcctgt aaattttatt gaaaggaaca aaatctgagt gaagctaaag |
| 102241 | tcactgattt cttttatctg ttctttggac tacataaaaa aaaataatgg acttggccta |
| 102301 | tttactactc tctaacttga aagtcagcat gcgtttaaga atgtttaaag aatgtttagt |
| 102361 | aacatattta aatatgaatg tgcattataa tgttcaaata aactacatta tgtaaaaata |
| 102421 | tatgctatga aatgttttaa tcataaaact atagtgaaaa ttaagtgtat gatagtgtat |
| 102481 | gcataattaa gaaacacttt acacaagaaa aataagtatt aagaagtgat cctctggata |
| 102541 | ttaaagtaat tagcaaatta ataagtggaa aagcaaatat gtattgttta ttttgttcaa |
| 102601 | ttttattttg ccaacattct aattcagtaa ccaagacaat tccctgtgat atcatctaga |
| 102661 | tcatatcaac caccaagaaa cccccacgat gtttctcaaa atgcaaagat agtttgaatg |
| 102721 | tgggaaagta gttaaacttc agtcatcaat gacaatttca taagattctc tgatttgtca |
| 102781 | agacatttta ctatttttgc ttagggttca agtttaaaag ttctgtgaag agagaagaaa |
| 102841 | aatgttgatt attatgatag tattatcaca tcatttttca gcctcaaagt aatttaatat |
| 102901 | aaattactct gaataattct aggtgaaaga catgagaacc tctgattgtt ttttgaaatt |
| 102961 | tctgcagagt cctggaagta gtcaaggtat caattagcat atacttagct ttgatatttc |
| 103021 | ttccaataaa tgttagacta atttcaatat gcttaaaatt gtgtaattct tctgccgata |
| 103081 | aataacttga atcagccctc agccttgtgt ctgatagtca tagtttgaga ggttatctga |
| 103141 | ctgctcagtt gttggtagga agtcctgtgc ataaaatgat aataatttca tttaaagatt |
| 103201 | aataaaacaa ttctactcaa aattaacaaa gcacattgtt taactgagat ttctataggt |
| 103261 | ttatttttta aatgtaacta taactttaaa cattaagtta taattttaat tataggtaaa |
| 103321 | aggggctaag aaatccaaat ggaaacattt tcaaaaagga aacatttttt ctaacctatt |
| 103381 | tcattggaaa atatctactc attttttggt aaaatttaac ttaagtaaaa ggctttccat |
| 103441 | tgtaggtgtc tttatgcaat tttttttaac ttttaggtcc acatgcaggg tcattatcac |
| 103501 | atatggcact aggctatcaa agactgctgt actatgtaat catcacttga gataaagaaa |
| 103561 | tatatatatt tatataataa atgcaaacct ttattataat ctacattatc tgtattagag |
| 103621 | attatttaaa tgtctaggtt catacatatc aaggatataa atgttatgta ttaattttca |
| 103681 | cacaatttaa tttcagctcc aaaaattttt ctaaaacaaa ctaggattaa aaaaggtggg |
| 103741 | aggggcacct ccaagagaaa aatttttaaa agaaaataaa attatcaata tggtgctttg |
| 103801 | tttttttgtt tgtttttctg aagggttaga ttgagtttaa aactttttgc tttttttctc |
| 103861 | ttttattggc ttttaaattt aatattgtca aaatagaaga aaagcaatcc gcataaatgc |
| 103921 | ctgaagagct aaataagatc tcagagaaca acctcgctac atgaaatcaa gtgacatgta |
| 103981 | acaaaatgtc acatggaaat gagaaatcct gtggcttttt gctttccact gacaagtgca |
| 104041 | tgagagagat gtggctgtgc aacttcactc tgagtattga ttgagaggtt ccttttttgt |
| 104101 | ctaaaatgtg ttatatacca aaggcaaaag cataaagaaa ataattccta cttttgaata |
| 104161 | aagtcagcac atttaaatat gaatgtgcac tataatattg ttcaaataaa ctatattagg |
| 104221 | tatataatta atccccaaac tatagataag taaagtgaaa taaattttcc taagtagcca |
| 104281 | tatgaaatct aatggtgaaa atgatacttc acactataga taggaaagga acatggagca |
| 104341 | aacagagatt caagacctta agattggtta taaataaatg gttgccatgt ggttttctta |
| 104401 | tcttctagac cagcactgtc caatagaaaa atgacagtca caaatgccaa tcatatacgt |
| 104461 | agttttaagt ttaatgtcca cattcaaaag aataaaaaaa gatatatata tttaacccaa |
| 104521 | tatattcata atgctatcac cttaacacaa gctatataag attattagta atatatttta |
| 104581 | catgctttta aaaatatctt caaaatctgg tatgcatttt acacataaaa cacatttcaa |
| 104641 | tttagactat aatttcaagt gctgaataac cacatgtggc tagtggctac ctactagaca |
| 104701 | gtgcagttct agaatatgtc atcactctta cattactagt ggattttaga gactatctca |
| 104761 | ttaatatcca gcagaatgaa tacataccta cctaaataca agcttattat ggtacccact |
| 104821 | tcttgttgag tcaggttttt ttgtttttgt tttttactat tggacttttt aaacacctca |
| 104881 | ataaaaatca taacctttct tacataatag aaggattcct taataaaact ttcttatcaa |
| 104941 | tcaaatagaa tggttaatag agttatgggt cacatggtta ttgccaattt ccaaaacatc |
| 105001 | catatgtaat aaatatacta aattcaatcc tgtattataa ttgttaaagt tgtcaatggt |
| 105061 | gattgtactt agatttgcac tagtatttgt agtaaggtat ttttgtattt ttaaaagtat |
| 105121 | attatactat tatatgtaaa ctttattgtc tatatattac aaacacaaat ctgtaccttt |
| 105181 | actagagagt gaatttttgg ccatttaaga aatgtatcag ttcatttgat aattccaaat |
| 105241 | catagatagc tctacaagaa atttctgatg gactctattg caggactcag tagtagaact |
| 105301 | taaatccaaa ttgctttatg aaattataaa tttagttggg aaaacaagca tgtatgtcta |
| 105361 | tgtcacatct ccaagtcagg tgagagaagt ctacattaaa ctcacctgac cactagcaac |
| 105421 | ttgaacaata attacaattt ttaaatgcag aagttcatgt tttgaggaag atatgctata |
| 105481 | ttgacctgtt aaagacttga tttagtgtcg agtaatttaa atcaacaaag ccatagacag |
| 105541 | aagcttagaa tgtcagcaag gagagcaatt attatgccta aatattgtag aagcacaaaa |
| 105601 | tagttttaga aaggagatgg aaaatgactt gcaaatagtg acttattttg ctagttataa |
| 105661 | aggtaaatat attttaatca tttgggatct ggtagccttt gttattaaag aaaaatagca |
| 105721 | tttctatttt tagttgcagg caagaaagta attttagaag aaaaaagccc attgaaattt |
| 105781 | aattaaaaga aatcattgtg gtaggcagtc ttcagtactg gtcagattat agaaattatc |
| 105841 | acttttttat tacaataaca ccacttaccc aactttttgc ttctatcttt actctcctgg |
| 105901 | taaaatcatt atgtgtttaa aagggagaga gaacaaaaca ggtaaagctg tagcaaaagg |
| 105961 | tacaaggata cagtcccttc ctggaaagag gattttgtgg cgaaccattt ctcccataat |
| 106021 | gcatcccaca gaccatatat ccactagaac aggagagaga gggtagtgaa gaaaagggag |
| 106081 | gaaagtaaag ttaactaaga taattgactt ctgaaggagg aggaaaaaga acagtttgat |
| 106141 | taaaagtaca attttcacct cccaccaaaa gttggccaaa atgtgaattc aaaccagcgc |
| 106201 | tatgctatta cataaacagt gtttagtatg agaactcaaa ttaatgttta aaaacccatt |
| 106261 | actttgtggg tgccttacat tgcctctcag cagtgccaca aagtggtgac attggtgact |
| 106321 | gagaaaagca atagctaaac caaaagtatc tccatggcag gtgacagcta aaagccacca |
| 106381 | aagggttttc tgtgtcattt tccggatgca tagaaaacaa tattaacttg tagagttggc |
| 106441 | tattttcatt ttctattcta ttcagttaca gagaataggg caacaagaga ccaccttttt |
| 106501 | tttcaggggg ccagggggcc ggggcaaaac aagataaatt caaccaaatc caataaacca |
| 106561 | ggaaatgact ggaaccatgg tttagaggca aaagaattgg aattcctggt atttgggact |
| 106621 | tagcttttcc ttcagaagtt tattcttgta aataaacatc agttttagtt tccatttgaa |
| 106681 | atatttcaag aaaaaagaca tatgatgaat tagcacatgt ataaaggagt catctggaag |
| 106741 | gaaagtgaaa aaagtattaa aggtgttaaa aattgttatg tacatatatt tatttccaaa |
| 106801 | ttgtcaaact tgttaggaaa acatgctttg ccttctctta ccaatcttta cccctttcca |
| 106861 | acttgctttt cattatggac aaagggaact tttgggcaga atcatttggc cgaattgttc |
| 106921 | catggggaag gaaggcgggg ctaggtgcag gggacagcag ggcatgcctg atgtgggagc |
| 106981 | aagcaggttt ttctgcatga taaccttcct cccattggtg ggagggcagc accagggtgc |
| 107041 | taggcaggcc tcctccatgg acttagagaa gtcaaaaacc taaggcagca acttgcaatt |
| 107101 | ccttctagtg agggaaggga aagggatttt aataccagct attggtagtg ccaagatctg |
| 107161 | aaagcccaaa taggcaaatt cagaccgccc caccccccag tctcctgtac attcttgatt |
| 107221 | cttgactttg tttctccttt gactttttaa aaataactcg tgaagaaagt ataaaaatgt |
| 107281 | cttcttttct gaataaatta gatgtggtat tgcctagcaa ggagggctag attcatctct |
| 107341 | tctgagtcaa aaggtaccag aactccgata ttgcccacca gggtgaacct gacctttgta |
| 107401 | agaggtgact ttttaacttc ctctgtataa atgcatacat acattatctg tcttctaatc |
| 107461 | taagagtata caaagaagtt tctgtaaact tcagtggcca gggaattttc acaaaagtac |
| 107521 | cctgtagcac ctgtacataa aaatacactg attattttta taaaacttat taatacagac |
| 107581 | tgctaaaaac taaatagaat agaatataaa aataaatatt aaagatacac tgaatacata |
| 107641 | tacaatccta atttaaaact attttaattc ctaagtatat tgaatatgtt ttcaatatgg |
| 107701 | tgcattactt gtaagatata gtctcatcaa aataatacat tgcaatgctt tctaacatat |
| 107761 | ttaataaatc cttagtttta atcaactaca ctcaattgtg atacattttt aagattcctt |
| 107821 | ccatagcctt cattttaaag tgttcatgaa cattaagttt tctttatgaa agcagtagtg |
| 107881 | tcaaatttga cattttcctt ttttacgatt tttggaatat ataaggattt attaggcaat |
| 107941 | tgctactcta aatgtttctt acagagcagc ttaaattatt acagaaattc ttattcagtt |
| 108001 | taaataattt ggattatttc aaagttgtct atgaagattt tcactctaag gatttgtgtc |
| 108061 | acttttttgc ttgtcttttt ctagaactac agccatcagt ctgagataca acataaaagc |
| 108121 | cacatggcta actgtggtag attcctttct gctttcacac tcatgctcag ctgagctgca |
| 108181 | acccaaatag caatttttct caatatctag gcacgtgtgc taatcagcat ccgcttgact |
| 108241 | gtttaatcag actccattta caattctttt tcactattaa catttagtgc tcttctagca |
| 108301 | aaactgactt ctcaataaca tccttcacat ttttaatgag tgtttcttac cagtagtatt |
| 108361 | aaaaaaaacc ctgaatatgc tatctggcag ccctacttta taaaagcatg tacataaaag |
| 108421 | agaacattcc ccttggctat ctacaacgtg cacccgtttc attcatggtt ttgatgctgc |
| 108481 | tctcccgaag catccctacc gttctccttg tagcccatcc ccaggatgac ctcaggggct |
| 108541 | ctgtaataac gtgtcaccac atatggagtc atcatgaagc ttgtgcctgc tgtcctggcc |
| 108601 | agtccaaagt ccaggatttt caatgtgcaa tcagacttga ctacaatgtt acttggtttt |
| 108661 | aaatcctaac agtaaggata agggaaaaaa ttaaaagcca gtatcaagtg aaatgttatt |
| 108721 | tccattgact caatcaacat agccattttg cagtagcact gatgaggtcc cccttgccta |
| 108781 | cagagctcta aataaggcaa atgattactg ctacaaataa gttaactatt agtttttgga |
| 108841 | aagtgtttta atcccagaaa agaattgtat tatcattttc acaatttaca ctaatcttgg |
| 108901 | gaagaggttt tagaaaaaaa aatatttatt gtcttctgtt aggtttctcc ttaggacaac |
| 108961 | ataaatcttt caacatatat atcatttcta ggcctgacag aagaacagat cagggaagct |
| 109021 | gtctttatgc tgccagaaac atctatggaa atgaattttc ttatttcagt tgcacatatg |
| 109081 | acttctgcca atcaaggagc tgaaagcatg aggcttctaa gaagctgcat ctcaatgagc |
| 109141 | caaaacataa cattgaacaa actcaactac aatataacta gaatttcctt ctacaattag |
| 109201 | tgaactaggt gctaattcta gtatcaaaga aatgaggaag tatattatat ttgaccaatg |
| 109261 | ccccccgtat aaagaaaata atctacagtt actcttcctc ttaaagcatt tgaattgtaa |
| 109321 | tcctagagaa ggtgttctta ccctgtgaat aattccagca gaatggaggt gcttaatgcc |
| 109381 | acacaacatt tggtacagca ggtaagacat tcgctcatgg tctaattcca tctgaatcac |
| 109441 | ttgacataag ttggcatcca tcagttccat tactaagtaa ctagaagggt gaatccacag |
| 109501 | tgttagttcc agatcacaag atctatgaag tcctttgatt tagtcagaat gctctcctaa |
| 109561 | ctctgtaagt cttctgaact tcttagctct gcctttgact taatcaagac tgagcatttc |
| 109621 | caggtattgc atgtgtgtta gctatacgaa ccctaccaaa aggttgctag tagaaaaagc |
| 109681 | atttattaat gtctggttca tgtccacaga tttgttacct taattttgct ttcactttcc |
| 109741 | cctgtattcc ctcaactctt ttgtgaatat tataatttca aataagaaaa aaattaagga |
| 109801 | cagcttcttc cattaaattc aatgtatctg tattaaagac aaggtgctag ggaatcactt |
| 109861 | cctctcctcc atctgttgtc actactgggt agactttgca caaaatcaat gacactataa |
| 109921 | agatagaaag aataaagata attttcacgt cccttttatt actatttctt tttgtttgtt |
| 109981 | tgttttgaga cggagtctcg ctccgtcacc caggctggag tgcagtggta cgatctcagc |
| 110041 | tcactgcaac ctccgtctcc cgggttcaag caattctcct gcctcagcct cctgaatagc |
| 110101 | tgggactaca ggtgcatgcc accacacctg gataattttt gtatttttag tagaggtggg |
| 110161 | gtttcaccat gttggccagc atggtcttga tctcctgact ttgtgatcca cctgcctcgg |
| 110221 | cctcccaaag tgctggaatt acaggtgtga gccaccatgc ctggccttat tactatttct |
| 110281 | tcaggtaaat taactcattg tagaaagttt gtggaatcta ttaataaata taaataaata |
| 110341 | agccttccct gagtgaccaa gagcatggaa caacaaagta tataaagcca caaggccaaa |
| 110401 | aggaggcaga atgtctttcc aggaagtaac cccacaaaca gaatcttctt tacatatcac |
| 110461 | tggacccctt tcatttgacc ccacctctta cctctctttg agcagtataa gggatttcaa |
| 110521 | ctctgtgtgt gtgtgtgtgt gtgtgtgtgt gtgtgtgtgt gtgtggtgtg tgattttccc |
| 110581 | ttgggctatc tgagtgctgt gctctccctt ccttcatgag ttttgttact tacacatctt |
| 110641 | ggaactcctc cagcgttttc tggggtgtga agacatttaa taaactaata atctgaaaga |
| 110701 | gagYggaagg gacagaggaa acgagagaaa gaaaaaagag agagaatgta ttatttttaa |
| 110761 | attgtatttc aactcaaagt cactcactag tgctatggca gaaatggaga agttggaaaa |
| 110821 | atgtcttgag ctgtctcaga ggacacagaa aagtatgctc agaaagaaca gatgatctgt |
| 110881 | cttcaggtta ataatgcagc taaaaagctc aattcttggg cagaagcaag agtcagagag |
| 110941 | atgcataatt |

[0411] Following is a MAPK10 genomic nucleotide sequence that includes the MAPK10 SNP “MAPK10-AA” (SEQ ID NO:).

AGCAAGGCAGATGATGGAACAACAAAGAGAATCACCACTGTAAAAGCCCC
CCAGTCCTTTGCCCACTAGGTCTGCTTTCCTATAATATGTCTAGGAGGTG
ATGATATTATCAAATTCACAGAATATAATATGTTCTGCATTCACTTGTCT
GTCTTAACACACACACACACACACACACACACACACACACACACACACAC
[A/C] CCAAATATTTCTTAAATAGTCACCTGTTATTTCCCAAGAACATC
CCAACTTTTCCGGTAGGCAAGTGTCAAGTCACCTGGACAATATTCCTCAA
AAAAAGTGAAGGTTCTACCTGGGGTTCGGGCTCATTTTGGAACATCAAGT
TGGCACTCTGAGGAGCCTAACCTTCTCTTAGGCTTCCTTTGGGGCAGTTG
GTTTCC

[0412] Following is a MAPK10 genomic nucleotide sequence that includes the MAPK10 SNP “MAPK10-AB” (SEQ ID NO:).

AACATAAAACAATTCCATTTAGAATAGCATCAAGAAATACATATTTAGGA
ATAAAGTTAGCAAAAGAAGTACAAGTTTTGTACTCTGAACTACGAAACAT
TGTTGAAAGAAATTAAAGAGGATCTAATAACTGGAAAAACATTTCATTGC
TCATGGATTAGAATATTTAATATTGTCAAGAAATGACAGATACTCCCC
[A/G] AATTGATGTACAGATTAAGCCAATACTTATCAAAATCATAGCTG
TCTTTTTTGCAGAAATTGACAAGCCCCATCTTAAAATTTGTGTGGAAATG
CAAAGGATACAGAATATCCAAAATAACCTTGAAAAACAACACAGCTGGGA
AATTTACATGTTCTGATTTCAAAACTTACTACAAAGCTACAATATTCAAG
ACAGAG

[0413] Following is a MAPK10 genomic nucleotide sequence that includes the MAPK10 SNP “MAPK10-AC” (SEQ ID NO:).

TTTGATGAGGCACATTTACCCTTTAGCCCATGTTAACATTTTCTTCAGGA
TTCATTACTATTAAAATTATTTATGAAAAAGTTTTTGTACTGGATCATTA
CCATCAGAATAATCAGAATGAATGCCACACTGAATATCAAAAGAAATAAA
ACTAAAATCATTATAAGGACACAACCATGTGATATTTGTCCATCTGCTCT
TTAAGCAATGTTATGTTATTTCTTGCAACCCCTACACAAAGGCCAAGAAA
TTACACAAGTACTAGTTTATTGGTTATTCACGGAGAGTGAGTACCTGAAG
GAGAAGGCTGTCCTTTTACTACACCATTTTTAGTCTTTTCTTCTGAATTC
ATTACTTCCTTGTAGATAAGTTCTGTAAGAAACAGCTGTGTTATTATAGA
AAACAAATTTATCCTTCATCCACAGGGAAATTCATTACTTAATGCCAATA
ATTACGTTTTGATGGGGTTGAGTAAATTAAAAATCA [A/G] TTGAGAT
TCCTTTACTGCTCTATTTCTATTTCTATATTGCCTTGTAATTAGCAGAGA
GCCTGGCACAAATAGGTATCTAGTAAAGCAGTTGAAGAAATCAATGCATG
AAAATTTATTTCTACGTACATGAAACATACTATTTATTTCCATATACATA
GTATTTATTTCTACATACATTTCTACATAAATAACATTTATTTCTACATG
CATGAAATATTTCTACATAAATGAAACAAGTAATACATGTTTTACTTGTT
TTCTGAATTCTTTGGGGGAAGTACTAATACATTCTAGCTCAATCTAGCAA
CAATTTTTATGGCTTTGAACATCCATTT

[0414] Following is a MAPK10 genomic nucleotide sequence that includes the MAPK10 SNP “MAPK10-AD” (SEQ ID NO:).

TTTGATGAGGCACATTTACCCTTTAGCCCATGTTAACATTTTCTTCAGGA
TTCATTACTATTAAAATTATTTATGAAAAAGTTTTTGTACTGGATCATTA
CCATCAGAATAATCAGAATGAATGCCACACTGAATATCAAAAGAAATAAA
ACTAAAATCATTATAAGGACACAACCATGTGATATTTGTCCATCTGCTCT
TTAAGCAATGTTATGTTATTTCTTGCAACCCCTACACAAAGGCCAAGAAA
TTACACAAGTACTAGTTTATTGGTTATTCACGGAGAGTGAGTACCTGAAG
GAGAAGGCTGTCCTTTTACTACACCATTTTTAGTCTTTTCTTCTGAATTC
ATTACTTCCTTGTAGATAAGTTCTGTAAGAAACAGCTGTGTTATTATAGA
AAACAAATTTATCCTTCATCCACAGGGAAATTCATTACTTAATGCCAAAT
AATTACGTTTTGATGGGGTTGAGTAAATTAAAAATCAATTGAGATTCCTT
TACTGCTCTATTTCTATTTCTATATTGCCTTGTAATTA [G/A] CAGAG
AGCCTGGCACAAATAGGTATCTAGTAAAGCAGTTGAAGAAATCAATGCAT
GAAAATTTATTTCTACGTACATGAAACATACTATTTATTTCCATATACAT
AGTATTTATTTCTACATACATTTCTACATAAATAACATTTATTTCTACAT
GCATGAAATATTTCTACATAAATGAAACAAGTAATACATGTTTTACTTGT
TTTCTGAATTCTTTGGGGGAAGTACTAATACATTCTAGCTCAATCTAGCA
ACAATTTTTATGGCTTTGAACATCCATTT

[0415] Following is a MAPK10 genomic nucleotide sequence that includes the MAPK10 SNP “MAPK10-AE” (SEQ ID NO:).

GGTATCGACAAACACTGACAATCAGTACCATTTTAAAACGTATCAATGGT
AAATCCCTTTCATTCTTGAGCAAA [T/C] GTGACATTGCTTTCGGCAT
GAAAAGACAGATGAAGTTTTAGGAGCTTTAAAAATGGTCTAAGAGAATAG
CAGTCAGCAAATCATTTTTTAGTAAATTGTTTTACAAGGAAAAGCCTTGT
TGATACTTTCTGAGTTCAATAAAATAAAAAGTATACTTTTTTAAGTAGTA
GACTTACCTTTCCATTCTTCAATTGTGTGTTCTCTTTCATCCAACTGCTT
GTCATATATCTGAGGTGGAGGCTGCCGAATAAAAACAAAAAATAATCTTT
GTGTGATAATGTAAACATAACTAAACTCTTACAATGCACGAGAATACCTT
GCCCTCATTTATTTCGGTGATTTCAACCGTATATAAGTTATGAGGAAATT
ACAGTAGTTCAGAAGTTAAAATTTTCCTGTAAACTTATGGAGGATTCATT
CATATTGCAATATTTGCTGCTGACCCAATATTGCTGCAATATTTGCAGCA
GAACGCAAATCCCGAGAGCTCACTTTCC

[0416] Following is a MAPK10 genomic nucleotide sequence that includes the MAPK10 SNP “MAPK10-AF” (SEQ ID NO:).

TGAGGGCAAGGTATTCTCGTGCATTGTAAGAGTTTAGTTATGTTTACATT
ATCACACAAAGATTATTTTTTGTTTTTATT [C/T] GGCAGCCTCCACC
TCAGATATATGACAAGCAGTTGGATGAAAGAGAACACACAATTGAAGAAT
GGAAAGGTAAGTCTACTACTTAAAAAAGTATACTTTTTATTTTATTGAAC
TCAGAAAGTATCAACAAGGCTTTTCCTTGT

[0417] Following is a MAPK10 genomic nucleotide sequence that includes the MAPK10 SNP “MAPK10-AG” (SEQ ID NO:).

GGTATCGACAAACACTGACAATCAGTACCATTTTAAAAGGTATCAATGGT
AAATGCCTTTCATTCTTGAGCAAATGTGACATTGCTTTCGGCATGAAAAG
ACAGATGAAGTTTTAGGAGCTTTAAAAATGGTCTAAGAGAATAGCAGTCA
GCAAATCATTTTTTAGTAAATTGTTTTACAAGGAAAAGCCTTGTTGATAC
TTTCTGAGTTCAATAAAATAAAAAGTATACTTTTTTAAGTAGTAGACTTA
CCTTTCCATTCTTCAATTGTGTGTTCTCTTTCATCCAACTGCTTGTCATA
TATCTGAGGTGGAGGCTGCC [G/A] AATAAAAACAAAAAATAATCTTT
GTGTGATAATGTAAACATAACTAAACTCTTACAATGCACGAGAATACCTT
GCCCTCATTTATTTCGGTGATTTCAACCGTATATAAGTTATGAGGAAATT
ACAGTAGTTCAGAAGTTAAAATTTTCCTGTAAACTTATGGAGGATTCATT
CATATTGCAATATTTGCTGCTGACCCAATATTGCTGCAATATTTGCAGCA
GAACGCAAATCCCGAGAGCTCACTTTCC

[0418] Following is a MAPK10 genomic nucleotide sequence that includes the MAPK10 SNP “MAPK10-AH” (SEQ ID NO:).

GGTATCGACAAACACTGACAATCAGTACCATTTTAAAAGGTATCAATGGT
AAATGCCTTTCATTCTTGAGCAAATGTGACATTGCTTTCGGCATGAAAAG
ACAGATGAAGTTTTAGGAGCTTTAAAAATGGTCTAAGAGAATAGCAGTCA
GCAAATCATTTTTTAGTAAATTGTTTTACAAGGAAAAGCCTTGTTGATAC
TTTCTGAGTTCAATAAAATAAAAAGTATACTTTTTTAAGTAGTAGACTTA
CCTTTCCATTCTTCAATTGTGTGTTCTCTTTCATCCAACTGCTTGTCATA
TATCTGAGGTGGAGGCTGCCGAATAAAAACAAAAAATAATCTTTGTGTGA
TAATGTAAACATAACTAAACTCTTACAA [T/C] GCACGAGAATACCTT
GCCCTCATTTATTTCGGTGATTTCAACCGTATATAAGTTATGAGGAAATT
ACAGTAGTTCAGAAGTTAAAATTTTCCTGTAAACTTATGGAGGATTCATT
CATATTGCAATATTTGCTGCTGACCCAATATTGCTGCAATATTTGCAGCA
GAACGCAAATCCCGAGAGCTCACTTTCC

[0419] Following is a MAPK10 genomic nucleotide sequence that includes the MAPK10 SNP “MAPK10-AI” (SEQ ID NO:).

GGTATCGACAAACACTGACAATCAGTACCATTTTAAAAGCTATCAATGGT
AAATGCCTTTCATTCTTGAGCAAATGTGACATTGCTTTCGGCATGAAAAG
ACAGATGAAGTTTTACGAGCTTTAAAAATGGTCTAAGAGAATAGCAGTCA
GCAAATCATTTTTTAGTAAATTGTTTTACAACCAAAAGCCTTGTTGATAC
TTTCTGAGTTCAATAAAATAAAAAGTATACTTTTTTAAGTAGTAGACTTA
CCTTTCCATTCTTCAATTGTGTGTTCTCTTTCATCCAACTGCTTGTCATA
TATCTGAGGTGGAGGCTGCCGAATAAAAACAAAAAATAATCTTTGTCTGA
TAATGTAAACATAACTAAACTCTTACAATGCACGAGAATACCTTGCCCTC
ATTTATTTCGGTGATTTCAACCGTATATAAGTTATGAGGAAATTACAGTA
GTTCAGAAGTTAAAATTTTC [C/T] TGTAAACTTATGGAGCATTCATT
CATATTGCAATATTTGCTGCTGACCCAATATTGCTGCAATATTTGCAGCA
GAACGCAAATCCCGAGAGCTCACTTTCC

[0420] Following is a MAPK10 genomic nucleotide sequence that includes the MAPK10 SNP “MAPK10-AJ” (SEQ ID NO:).

GGTATCGACAAACACTGACAATCAGTACCATTTTAAAAGGTATCAATGGT
AAATGCCTTTCATTCTTCAGCAAATGTGACATTGCTTTCGGCATGAAAAG
ACACATGAAGTTTTAGGAGCTTTAAAAATGGTCTAAGAGAATAGCAGTCA
GCAAATCATTTTTTAGTAAATTGTTTTACAAGGAAAAGCCTTGTTGATAC
TTTCTGAGTTCAATAAAATAAAAAGTATACTTTTTTAAGTAGTAGACTTA
CCTTTCCATTCTTCAATTGTGTGTTCTCTTTCATCCAACTGCTTGTCATA
TATCTGAGGTGGAGGCTGCCGAATAAAAACAAAAAATAATCTTTGTGTGA
TAATGTAACATAACTAAACTCTTACAATGCACGAGAATACCTTGCCCTCA
TTTATTTCGGTGATTTCAACCGTATATAAGTTATGAGGAAATTACAGTAG
TTCAGAAGTTAAAATTTTCCTGTAAACTTA [T/C] GGAGGATTCATTC
ATATTGCAATATTTGCTGCTGACCCAATATTGCTGCAATATTTGCAGCAG
AACGCAAATCCCGAGAGCTCACTTTCC

[0421] Following is a MAPK10 genomic nucleotide sequence that includes the MAPK10 SNP “MAPK10-AK” (SEQ ID NO:).

TCTCCATTTCTGCCATAGCACTAGTGAGTGACTTTGAGTTGAAATACAAT
TTAAAAATAATACATTCTCTCTCTTTTTTCTTTCTCTCGTTTCCTCTGTC
CCTTCC [A/G] CTCTCTTTCAGATTATTAGTTTATTAAATGTCTTCAC
ACCCCAGAAAACGCTGGAGGAGTTCCAAGATGTGTAAGTAACAAAACTCA
TGAAGGAAGGGAGAGCACAGCAC

[0422] Following is a KIAA0861 genomic nucleotide sequence (SEQ ID NO: 3).

| >3:184201001-184348700 | |
|---|---|
| 1 | aaagccaaga ctcccattcc taaaccctag ctcaggtctc catctcttaa atccgagtga |
| 61 | cctctacaaa ctctccctga gaaggtgtcc agaacccttt tggaagcgag ggacagtgtc |
| 121 | actgtctttg gggttgacac ctgctctgag taactcacgg aaaacaagtt ccagctggga |
| 181 | agcccttgga cgcgccacac ctccctaccc gcagcccgtc ctgtggcgcc cgggactcca |
| 241 | gagtgYgttt agatgaaagg ggaccgacac gtcagggcca ccgcgggaag cgctgagggc |
| 301 | cactcaccgg ccagggacgc gaagagcgcg gccgccgcgc tgagctgccg gggcatggtg |
| 361 | ggcgctgggc gaggttctgc agcgtgcggc gaRgtccggg caggccccga atcggtgcca |
| 421 | gagaaaccta cctgtgccgg agaaacgaaa ccacctgctt atgagaagca gccgaaaagc |
| 481 | ccgcccaggg ccgctgggcg gggagggaaa ctccgccggc cccctcctac ccctacggag |
| 541 | cagggagggg cggggactcg gcgcagccgc cggggcccgg gcctctggga ccgtttaccg |
| 601 | cacgcgcgtg gtcccggcag cgccggcStc ctccgctcat accctgggtc tcctcctttc |
| 661 | tttttctttt ctttttgaga cgaagtctcg ctctgtcgcc cagggtggag tgcagtggcg |
| 721 | cgatctcggc tcactacaac ctctgcctcc cgggttcaag cgattcttct gcctcagcct |
| 781 | cccgagtagc tgggattaca ggcatgcacc accacacccg gctaattttt gtatttttag |
| 841 | tagagacggg gtgtcaccat attggccagg ctggtctcga gctcctgacc tcgtgattcg |
| 901 | cccgcctcga cctcccaaag tgctgggatt atagacgtga gccaccgagc ccggccaggg |
| 961 | tctcctcttt tatttctttt ctttttattt cttttgtttt gttttgtttt gttttgtttt |
| 1021 | ttgagacaaa gtctcgctct gtcgccaggc tggagtgcag tggcgggatc tcggctcact |
| 1081 | gccctggttc aagcgattct cctgccgcag cctcccgagt agctggggtt acaggcgccc |
| 1141 | gccaccacgc ccagctaatt tttgtatttt agtagagacg gggtttcacc ctgttggcca |
| 1201 | ggctggtctc gatctcctga ccttgtgatc cgcccgcctc ggcctcccaa agtgttggga |
| 1261 | ttacaggcgt gagccactgc gcccggccca gggtctcctc ttttctaaca gctcgggtac |
| 1321 | ctttctggga acccagagac gcttctcagc cgggagaaag ccagccacta ggcgagcagg |
| 1381 | agcctaaaaa cccctaagca ccctgactcc atgtcttccc agggagtctg cggcagccgc |
| 1441 | gctccacgcc caggcctcgc caggaccgcg gtttgcggga agcaacagga gcacagccca |
| 1501 | gaggcgctag gtctggctgg gagctcgcgc tgccgactcc ccggcgtgcg gcgtcgggga |
| 1561 | acctctagga gccttggatt cttcagctgt aaaacggaca taataatgcc cactcccagt |
| 1681 | ttgtttttga gacagggtct cactctgtcg cccaggctgg agggcaatgg cgtgatctcg |
| 1741 | gctcactgca aacttgggtt caggcgattc tcctgcctca gcctccacag tagctgggat |
| 1801 | tacagatgtg cgccaccacg tccggctaat tttttgtatt tttagtagag accaggtttc |
| 1861 | accgtgttgg ccaagctggt ctcaaactcc tgaccccagg tgatccgccc gcctcggcct |
| 1921 | tccaaagatc tgggattaca agcgtgagcc actgtgcctg gccccaggig gttttacaga |
| 1981 | ccagaaaatc ctggaacaaa aaacacacaa tatcgttttt tttttttttt tggagtcagg |
| 2041 | gtctcgctct atcacccagg ctggagtgca gtggcgtgat ctcggctcac tgcaacttcg |
| 2101 | acctcctggc ctcaagtgag tctcccacct tagcctcctg agtagctggg accaaaggcg |
| 2161 | cgtgccacca cgcccagcta ttttatttta ttttatgtag agaggaggtc tcgctgtgtt |
| 2221 | gcccaggctg gtctcgagtt cctggcctca aatgatcctc ctgcgttagc caaccattgg |
| 2281 | gattacaggc gtaagccacg gcccacggct caacaacgct gacaggcaac cttttaatgt |
| 2341 | cttatctcct tcctctatta attggattgt ctgtcaaaac aacgatgttt tgacagggct |
| 2401 | tgagtcccag tggggaatac acatttaagc agtatattag gagaccctcc ttatcactag |
| 2461 | attgagggct ttcagcctag cctcaaatta ttttctgaaa aataactttg gctacaacta |
| 2521 | ttttgtctta ctatgttgct ccaaacacta atcaagtaaa cttaaccaaa gcttgcagtg |
| 2581 | tgtttcagaa tggaattttt atggtgaaaa gtgagggtta acttgtgcca gtcaacctag |
| 2641 | tttcagcaac tacctgcttt ctgatctttg agacagttta ttcaaaagac gataattaag |
| 2701 | tgggtataga ctgtgtgcca ggcactcttc ttattccatt taagcgccat agccactcta |
| 2761 | tatggacact gttgttatta tcgctgcccc atttcgcaga tggagaaact aagcacaaag |
| 2821 | aagggagttg cccagagtca cttagataat aaataccgaa acctgaccat aaatcttgtc |
| 2881 | tgccttgaga gtctaggatt ttaagcacat agccgggcgc agtggctcac gcctgtaatc |
| 2941 | ccagcacttt aggaggccga ggcgggcgga tcacgaggtc aggagatgga gaccatcctg |
| 3001 | gctaacacag tgaaacccag ttctattaaa aatataaaaa aattagccag gcgtggtggc |
| 3061 | aggtgcatgt agtcccagct actcgggagg ctgaggcagg agaatggtgt gaacccagga |
| 3121 | ggtggagctt gcagtgagcg gagatcgcgc cactgcactc cagcccgggc gacagaagga |
| 3181 | gactccgtct caaaaaaaaa aaaataaata aaataaagct gctcctctta ccctggaaat |
| 3241 | tccaagggat ttaggagctc tgtttcagga accagggtca aagaccaagt attaaaacaa |
| 3301 | aagattctcc tagaactctg gcatataagg attttaggag ctctgtctta gaaactggga |
| 3361 | cagagaccaa agatatatta ttatatcgca gtatcatagt ttattatttt caaaaaacgt |
| 3421 | tttctggctg gtacagtggt tcatgcctat aatccaagca ctttgggagg ccaaggtggg |
| 3481 | agggtcactt gaggccagaa gttcaagtcc agcctgggca acacagggag accctgccac |
| 3541 | tattaaaaat tttttaaatt agctgggcat ggtggcacat gcctgtagtc ccagctactt |
| 3601 | gggaggctga agcaggagga ttgcttgagc ctgagaggtc aagactgtag tgagctgcga |
| 3661 | tcaagcgact gcactctagc ctgggtgaca aagccagacc ctgtgtctaa aaaaaagaaa |
| 3721 | agaagaggaa aaaaaaaggt ttttatttca actaagttgt tggatttatt agcataaagc |
| 3781 | ttttcataac aatcccttgt cttacaatat ctgtagtata ggtagtgatg tcacttcttt |
| 3841 | tattactaat attaataatt tgtattttct ctcttatttc cctgctaata ttaataattt |
| 3901 | gtattttctc tcttttttcc ctgataagtt tggctggagg ttgatcaatt ctattcatgt |
| 3961 | tttcaagaaa aaaaaaaaaa tttcatttca tcgagttcct tcattgttct tatgttttct |
| 4021 | gttttattca tttctacctg atctttatta ttttctttct tctacttaac ttgtgtttta |
| 4081 | tttgctcctc tttcaatagt tttcaaagat ggaacttgcc tgggatatcc cagcacttta |
| 4141 | ggaggctgag gtgggaggat cacctgaggt caggagttca agaccagcct ggccaacatg |
| 4201 | gtgaaactcc gtctctacta aaaatacaaa aattagctgg gtgtggtggt gggcacctgt |
| 4261 | gatcccagct actcgggagg ctgaggcagg agaatcgctt gaacccggga ggtggaggtt |
| 4321 | acagtgagct gagatcacgc cactgcactc cagcctgggt gacaggagct agactctgtc |
| 4381 | tcaaaaaaaa aaaaagaaaa aaaaaaagat ggaagttgag gccagtggta taaaatcttt |
| 4441 | cttcatctct aataaacagg tttactgtta tgaacgtccc tctaattact actttagttg |
| 4501 | gatcccacaa gtttaatatg ttttcatttt catataatta gaaagacttc ctaatttcct |
| 4561 | tttgctatct cctcgactca tggttattta aaatagcatt atttcatttc caaacatata |
| 4621 | gtttttcaga tatctttctt ttattgattt ttaattccac tgtggttgaa aacataatta |
| 4681 | tggacttaaa tcttacaaat ttattgatat ttgttttttg accaagacta tggttggtta |
| 4741 | cattagtttt caggactgac ataacaaagt gccacagact gggtaattaa accacagaca |
| 4801 | tttgctttct tataattctg gaaaccagac atgtgagatc aaagtgtcag ccgggttggt |
| 4861 | tttttctttt tccttttttt tttttttttt tgagacagag tctctttctg tcacccaggc |
| 4921 | tgggatgcag tggtgtgatc tcggcttact gcaaattctg cctcccaggc tcaagcgatt |
| 4981 | ctcctgcctc agcctcccga gtagctggga ttacaggtgc ctctcactgc acctggctaa |
| 5041 | tttttgtatt tttagtagag acggggtttc accatgttgg ccaggttgat ctcaaactcc |
| 5101 | tgatctcagg taatacaccc gcctcggcct cccaaagtac tgagattaca ggcgtgagcc |
| 5161 | actgcacccg gcccgggtta gttctttcta aggcctctct ccttggctag tagacacctt |
| 5221 | tgtttcacat ggtcatccct ctgtgcatgc ctttgtctgt cctaatctcc tcttcttata |
| 5281 | aggacattag tcaggtagga ttagtgccta ctctttgaac tcgttttacc tcttaaagac |
| 5341 | cctatctccg aatatagtca cattctgaga tacttggggt taagacttgt attagtccat |
| 5401 | tttcacgctg ctcataaaga catacctgag actgggaaga aaaagaggtt taattggaca |
| 5461 | attccacatg gctggggagg cctcagaatc atggtgggag gcgaaaggga ctttttacat |
| 5521 | ggtggcggca agagaaaatg aggaagaagc aaaagcagaa acccctgata gataagccca |
| 5581 | ccagatatca tgagatttat tcactgtcat gagaacagca cgggaaagac cagcccccat |
| 5641 | gaatacatta cctcttcctt ggtccccccc tccccacaat atgtggggat tctgggagat |
| 5701 | acaattaaaa ttgagatttg agtggggaca cagccaaacc atatcattct gtccctggtc |
| 5761 | cttccaaatc tcatgtcctc acatttcaaa accaatcatg cctttccaat agtccctcaa |
| 5821 | agtcttaact catttcagca ttaacctaaa agtccacagt ccaaagtctc atctgagaca |
| 5881 | aggccttccg cctatgagcc tgtacaatca aaagcaagct agttagttcc tagatacaat |
| 5941 | gggggtacag gtattgggta aataaagcca ttccaaatgg gagaaattgg ccaaaacaaa |
| 6001 | ggggttacag ggcccatgca agtctgaaat ccagtgaggg agtcaaattt taaagctcca |
| 6061 | aaatgatctc ctttgactcc aggtcttaca tccaggtcac gctaatgcaa aaggtaggtt |
| 6121 | tccatggtct tgggcagctc cacccctgtg gctttgcagg gtacagcctc cctccaggct |
| 6181 | gctttcatgg gctggtgttg agtgtctgca gcttttccag gcacccagtg caagctgtca |
| 6241 | gtggatctac cattctgggg tttggaggac aaaggccctc ttctcacagc tgcactaggc |
| 6301 | agtgccccga tagggactct gtgtgggggc tctgatccca catttccctt ctgcactgcc |
| 6361 | ctaagaggtt ctccttgagg gccccacagc ttccaccctc tgaaccatag cccaagctat |
| 6421 | gcattggccc ctttcagcca tggctggagc agctgggaca gagggcacca agtcactagg |
| 6481 | ctgcacacaa catggggacc ctgggcctgc cccacaaaac ccctttttcc tcctgggcct |
| 6541 | ccaagcctgt gatgggagag gctgctgtga aggtctctga catggccttg gagacatttc |
| 6601 | cccatggtct tggggattca cattaggctt cttgctactt atgcaaattt ctgcaaccag |
| 6661 | cttgaatttc tccccagaaa atgggttttt cttttctgtc acatagtccg gctgcaaatt |
| 6721 | ttccaaactt ttatgctctg cttcccttat aaaactgaac gcctttaata gcacccaaat |
| 6781 | cacctcttga atgttttgct gcttagaaat tttttccacc agatacccta aataatctct |
| 6841 | caagttcaaa gttccacaag tctctagggc aggggcaaaa tgtggccagt ctctttgcta |
| 6901 | aaacataaca agaggcacct ttgctccagt tcccaaaaag ttcctcatct ccatctgaga |
| 6961 | ccacctcagc ctggatctta ttgtccatat cactatcagc attttgggca aaaccattca |
| 7021 | acaagtctct aggaagttcc aaactttccc acattttcct gtcttcttct gagcccttca |
| 7081 | aactgttcca atctctgcct gttacccagt tccaaagttg ttccacattt tcaggtatct |
| 7141 | tcagcaacgt ttcactctac tggtagcaat ttactgtatt agtccatttt cacactgctg |
| 7201 | ataaagacat atctgagact gggaagaaaa ataggtttaa ttggacttac agttccacat |
| 7261 | ggctggggag gcctcagaat catggtgaga ggtgaaaggc acttcttacg tggtagtgac |
| 7321 | aagagaaaat gaggaagaag caaaagcgga aacccctgat aaatccatca gatctcatga |
| 7381 | gacttattca ctatcacgag aatagcatgg gaaagaccgg cccccatgat tcaattacct |
| 7441 | ccccctgggt ccctcccaca acacatggga attctgggag atacaattca agttgagatt |
| 7501 | tgggtgggga cacagccaaa ccatatcaag acttctacat atgaattttg gagggacaca |
| 7561 | atttaactca taatagtgga ctgtcYtgtt aaatgttctg tgtgcacttg agaagaatgt |
| 7621 | gtgtattctc tcattgttgg attcagtgac ctataaatgt taattaggtt aaactaattg |
| 7681 | atgtagggaa aagaaagaga gatcagactg tcactgtgtc tatgtagaaa gggaagacat |
| 7741 | aagagactcc attttgaaaa agacctgtac ttcaaacaat tgctttgctg agatgttaat |
| 7801 | ttgtagcttt gccccagcca ctttgcccca gccactttga cccaacttgg agctcacaaa |
| 7861 | aacatgtgtt gtataaaatc aaggtttaag ggatctaggg ctgtgcagga cgtgccttgt |
| 7921 | taacaaaatg tttacaagca gtatacttgg tcaaagtcat cgccattctc tagtctcaat |
| 7981 | aaaccagggg cacaatgcac tgcggaaagc tgcagggagc cctgcccttg gaagcggggt |
| 8041 | attgtccaag gtttctcccc atgtgacagt ctgaaatatg gcctcgtagg atgagaaaga |
| 8101 | cctgactgtc ccccagccca acacccataa agggtctgtg ctgaggtgga ttggtaaaag |
| 8161 | aggaaagcct cttacagttg agatagagga aggccactgt ctcctgcctg cccctgggaa |
| 8221 | ctgaatgtct tggtgtaaaa cccgattgta catttgttca actctgaaat aggagaaaag |
| 8281 | ctgccctgtg gtgggaggtg agacatgttt gcagtaatgc tgccttgtta ttctttactc |
| 8341 | cactgagatg tttgggtgga gagaaacata aatctggcct atgtgcacat ccaggcatag |
| 8401 | taccttccct tgaacttaat tatgatacag attcttttgc tcacatgttt tttgttgacc |
| 8461 | ttctccttat tatcaccctg ctgtcctact acattccttt ttgctgaaat aatgaaaata |
| 8521 | ataatcaata aaaactgagg gaactcagag gctggtgccg gtacaggtcc ttggtgtgct |
| 8581 | gagtgccggt cccctggact cactgttgtt tctttatact ttgtctctgt gtcttatttc |
| 8641 | ttttctccgg ctctcatccc acccgactag aaatacccac aggtgtggag gggcaggcca |
| 8701 | ccccttcaat tgatagtatg gttcaagaac aaatggtatc aacttaggat ggtttaactt |
| 8761 | atgatttttc aactttagaa tggtgtgaag tctgtatgca ttcagtagaa ggcatacttt |
| 8821 | gaatttttat cttttcccaa gctactgcta tgggacaaga tactctctca caattctggg |
| 8881 | cagtggcagc aagcctcagc ttccagtcag cacccaatcc caagggtaaa caactgatac |
| 8941 | agccattctg tttttcattt ttagcaaaat actcaataaa ttacatgagg cactcaatgc |
| 9001 | tttattataa gacaagcttt gtattagatg atttgcccaa ctgtaggcta atgtaggtgt |
| 9061 | tctgagcaca tttaaggtag actatactat gccatgatgt ttggaaggtt aggtaaattt |
| 9121 | aatgcatttt cgacttagaa tactttcagc ctcccaaata gctgggacca caggtgtgtg |
| 9181 | gcaccatgtg tggctaattt tttgtggaga caaggtctca ctRtgtcgcc caagttggtc |
| 9241 | tcaaaatcct gacttcacgt gatccttcca ctctggtctc ccaaagtgcg attacaggtg |
| 9301 | tgagtcacca cacctggccg tgttgtcaca cattttaatt ctttataaat tagaaacttc |
| 9361 | acaacacatt gttcttattt aaaatttaaa caattatctt taaatataca taatatataa |
| 9421 | atatgtatat aatatataaa tatatacaat atataaatat ataagatata ttatatatat |
| 9481 | aatatataaa tatataatat ataaatatat aatatgtaaa tatataatat ataaatatat |
| 9541 | gtaaatatgt aatatgtaaa tatgtaatat gtaaatatat aatatgtaaa tatataatat |
| 9601 | ataaatatac ataatatata aatatataat atataaatat ataatatata aatatataat |
| 9661 | atataaatat ataatatata aatatatatt atatataaat atataatata cataaatata |
| 9721 | tataatatat aaatatatat aatatacata aatatataat atataaatat atataatata |
| 9781 | tataaatata tatggggaaa aaagctttta tacttactca tgtgattacc gtttcttgca |
| 9841 | gtctttattc ctttgtttag atccttggga tttttgttgc tatggtgacc ttagttatac |
| 9901 | caggcacttc aaatcttacc ttgtgtttag gaWatgggct tgtttgccca aaggtcttcc |
| 9961 | ctaatgtctg ctccaccttc aactttaggt cttctctgct gtcagtttct ctctccatac |
| 10021 | acttgtagct ctcccaggag tattccatcg ttacttgtta gtcagtgctt attagcgggg |
| 10081 | tggtgggatc tgagaggtga ggtgcttggt tgtgattctc agttctgatt cctgcaggta |
| 10141 | ctgtgtccct gggYcttgaa gggtatgacc aagcStctct gtccctcccc gcagcagtag |
| 10201 | ttttgggctc agcacatatt cctgcccctt ccccagaatc agagggtttt ttgttgttgt |
| 10261 | tgttttgttt ttcaagtttt tgttcctttt tctccatctg tgttggattt accagccccc |
| 10321 | taggagcgtc agtatttgtt acccttcctc caggctttta aggcctttgt aggagagatg |
| 10381 | ggccaatagc atctgagcat ggttttgtgt ctttcttgta gcaactgata ttcctcaccc |
| 10441 | ccaggtctat gccaggaagg atgcttcctt acatgcctgt aatcccagct accggggagg |
| 10501 | ctgaagcaga agaatcactt gaacccagga ggcagaggtt gcagtgagcc aagatcatgc |
| 10561 | cactgcactc cagcctggca acagagcgag acttcattca aaaaaaaaaa aagctcttac |
| 10621 | actcttctgc atattctgca aagtatactc tgggaaggct ggtttagagg atctctaact |
| 10681 | tttctaatat ttcataatgc atggctgatg tttaacatga actcagactc ccatcagatt |
| 10741 | ttacagatct gggtctgctt ttagttctaa tgcttcagcc agggcacttt aatctgaggt |
| 10801 | cacagcattc ccaattgtca gcagtatttt gaaatctaag ttcctctggt ggacaacagg |
| 10861 | caacatcata tagccaYgga ggatctgaac aacttctaag tctgagSgat tttatctggt |
| 10921 | ggttttggat tcttttccat ttatacttaa acaaggtgac acaaatgtca ctcacagaaa |
| 10981 | agccactctt ttttcccctg tttttaagaa gtctaaaaat gcacaactat ttcctgaatg |
| 11041 | agcagtgtgt ccaggtgtag aatagggaat gtcgtgtcca ctgggaacag acggtgtacc |
| 11101 | tggcacaatt ttatgagaat tatcccatga ttcctgtccc accctgcagc ccaCcatggg |
| 11161 | ctcagtgggg agtctgagtc tctgagcccc aaagggtagc tttttcccag acgacaccag |
| 11221 | caagcagagc agcagcttgg ggctttgaca aggaggctgg agtgaaaggt catattggac |
| 11281 | catcctggRt cactggagga caatacccca ggaacctcca gcaatgactg gtattggaat |
| 11341 | gactcccctg gtcacccacc tgtggcaaga catttgcaaa cagggtcttc ctatgaggct |
| 11401 | tgtgaggttt ggccaatttg cattctgcta gaattattaa gtatggacat cctcatagat |
| 11461 | ccagaaaagg gccgagatcc aaaggattga gaatgctttg gggggtgttt ccatagtgag |
| 11521 | tggctggcta ttcaacagtc aaatgtttga gaggatacaa gtgatgtgtt tcctgaggca |
| 11581 | agtggtcaga acccaacaga ctcttctgtt cagctaagat gagagaccat ctgaagttct |
| 11641 | tacatgttct cacagagaaa tggattctca tagggaaatg gatatattgt gatagacact |
| 11701 | gtaagcagag aagttgactg agaaacacac acacacacac acacacacac acacacgtca |
| 11761 | agactgaatg catagatgtg tattataaaa agYgtaaaaa tacaccacca ttStaacaga |
| 11821 | ttgtgtagga ctatattttc ttttttttta atttattatt attatacttt aagttttagg |
| 11881 | gtacatgtgc acaatgtgca ggttagttac atatgtatac atgtgccatg ctggtgtgct |
| 11941 | gcacccatta actcgtcatt tagcattagg tatatctcct aatgctatcc ctcccccctt |
| 12001 | cccccacccc acaacagtcc ccagaatggg atgttcccct tcctgtgtcc atgtgttctc |
| 12061 | attgttcaat tcccacctat gagtgagaat atgtggtgtt ttgttttttg tccttgcaat |
| 12121 | agtttactga gaatgatgat ttccaatttc atccatgtcc ctacaaagga catgaactca |
| 12181 | ccatttttta tggctgcata gtattccatg gtgtatatgt gccacatttt cttaatccag |
| 12241 | tctatcattg ttggacattt gggttggttc caagtctttg ctattgtgaa tagtgccaca |
| 12301 | ataaacttac gtgtgcatgt gtctttatag cagcatgatt tatagtcctt tgggtatata |
| 12361 | cccagtaatg ggatggctgg gtcaaatggt atttctagtt ctagatccct gaggaatcgc |
| 12421 | cacactgact tccacaatgg ttgaactagt ttacagtccc accaacagtg taaaagtgtt |
| 12481 | cctatttctc cacatcctct ccagcacctg ttgtttcctg actttttaat gattgccatt |
| 12541 | ctaactggtg tgagatggta tctcactgtg gttttgattt gcatttctct gatggccagt |
| 12601 | gatgatgagc attttttcat gtgttttttg gctgcatcag tgctctacac gttcagagaa |
| 12661 | acttctctag tgacgaacta tagaaatgat ccctgaaagt atagtcttag gactatattt |
| 12721 | tcttttgact tgggaggcat gtttattgct gttaatgctg caaagggctc tacgtgcttt |
| 12781 | aaaaaatccc aatctgttgc attcataagc ctgggttgga tctaaagcag cctcccactt |
| 12841 | ttggaaaggc atccccacga cctttccatg gttgctgaat gcagctggag gcagtcacag |
| 12901 | ctggtgatgt ccggagccca ttccccactg tgctggtctg cagaacttct gcatgccatt |
| 12961 | cccacaagca ggtctctgcc ctgctctcct ccacctccct tgtcagagga agtctgcact |
| 13021 | tcacagcttt ctggtctcaa ccctcctcca tccctacaga tgtgtaagca gcaggaatca |
| 13081 | aaaggtgaag gagagggggc aactcacctc cgatggacac gtgaaaagtg ggagatggat |
| 13141 | aaaatcaaga aggagcttaa gatatccaga aatgtaaact gtgtttggaa aagtaaggtc |
| 13201 | aggagaagca tgggactcct gaggttgctc cctactatct tgcagacttg ctgcaggacc |
| 13261 | aaatgaagca ggatctgtca agcaccaggg ccagctctta agcttagtgc ctttctgaac |
| 13321 | cctgtgaccc agcagcctcc atcaactcgt cctacctgcc atgcacagct cctctgtgcc |
| 13381 | cctgtacctg agctcatgct attccctctg ccaggatgcc cttctccttc tccaccagga |
| 13441 | gaagaacact tgccagtaag acccagttct aatgtcaccc cttcctgacg gtatcaggaa |
| 13501 | gagtcaStga tggtgtttta tgctcccaga gaatttgcca cattgtgttg tgattatttt |
| 13561 | tccacatctg tctcccccac tggaatgaga gcctcactca tcttcatacc tccctggtct |
| 13621 | ctacctggtg ccagaaccat cctcagggca ggggaatgct caggaaatag atattgaata |
| 13681 | aaataagtgt atccatccat ccatccatcc atccttccat ccatccagac atatatacat |
| 13741 | atgtaaacat tctgatggtc aaatggaaca atgtgggctg aagaataatg caggtagaag |
| 13801 | aacctaagat tacagattct tgatttggga ggaactttat tttattgtgc aaacagtcta |
| 13861 | caaatttgaa acatactcta tcaagaaaga cactgttgtt aggaaagggc gtgggagagg |
| 13921 | gtggccccac aaaacagtgt aaagttctaa agaatttgag aggaacactc tgcgggaccc |
| 13981 | tgttccaagg gcatctttct aagagtctgt cccttaggct ctgccccttt ttggccacgt |
| 14041 | tgtcaaaggc cttctttatg aacgaagtga gacacattat ttttgttttc ttgaattcta |
| 14101 | aagtgattgt cttgagttcc ctgggggaga ctcctgggag gtgtggccca ctctattcca |
| 14161 | gaaacaaacc aggagactga agactcatcc caatcccata tcccatgaaa atgtgaaatc |
| 14221 | aaatcacccc tgacaattcc aaaactaaYg gaatcctaac ataactctat gtaactctaa |
| 14281 | agctgagtgt gctggtaatt aagcttccag cccacccttc ccagctctgg ggtgcagggt |
| 14341 | caccatgggc tccttcctgt gtgcacccca ccccaccccc actgtcagca tcctgtctcc |
| 14401 | accctgagag tgacagctgg ttccagtagc gggagttggt tccagcttgc cattttccta |
| 14461 | gcactcctat aaccagcctg ctgatgccca ttcagagaca gcagcacggg ctggccatgt |
| 14521 | cccctctcca gaattctgcg tccagctcct ggaccttgag ctctgagccc ttgggccacg |
| 14581 | tgtacMatta atagtgcctc ctcctcagag gactaacccc cagccctagg gccaccttca |
| 14641 | tatttcYgag ttttgatatt ttcaacctct tttctttgtt gtatgagtcc ttgggctggg |
| 14701 | agcttgcagt caaaatcttc atgatatctc attatcacta ctttttttta aatctctact |
| 14761 | agctggataa caattattta tattaaattc tctcttgaaa taactgatac agtgtctctt |
| 14821 | gattgaaact tgactagtag actaagaatt ctaactctaa ataattctga gggccgggtg |
| 14881 | tggtggctca cacctgtaat cccagcactt tgggaggcca acgcgaatgg atcacctgag |
| 14941 | gtcaggagtt ggagaccagc ctggcaaaca tggcgaaacc cggtcaggag atccagacca |
| 15001 | tccYggctaa catggtgaaa cctcatcttt acttaaaaaa aaaaaaaaat acaaaacaaa |
| 15061 | attagccagg cgtggtggca gatgcctgta gtcccagcta ttcaggaggc tgagacagga |
| 15121 | gaatagcgtg aacccgggag gtggagcttg cagtgagccg agattgcacc actgcactcc |
| 15181 | agcctgggtg acagagagag actccgtctc aacaacaaca acaacaaatt agccgggcat |
| 15241 | ggtggcaggt gcctgtaatc tcaactactt gggaggctga ggtaggagaa ttgcttgaac |
| 15301 | ccgggaggcg gaggttgcag tgagccaaga ttgcggcact tcactccagc ctgggtgaca |
| 15361 | agagcaaaac tccatctcaa aaaaaaaaaa aaagaaaaaa aaatctgaca attaaataaa |
| 15421 | gaacagaaaa aaaatttgaa tggcaaatac aaagctgaaa agaaataact gagaataaat |
| 15481 | aactctgaaa atagctcaaa aactaaatac ctcaaaaact ctttaaaaat tcagaaaata |
| 15541 | taatgttcaa atatgaagta atgctgaaaa tgaaataact aaaaaccaag taacttgaaa |
| 15601 | aaaagaacat aaaaataaac aactcaaata taaaataact gaaaataaat acctgtgaac |
| 15661 | ataagcaact cgaaaaccag ataactaggg gaaacccttc attaaaacat ttcactctga |
| 15721 | aaataaataa cttgacagta gttcatgaac ttccagtgag tgtttaatag tcaaataagt |
| 15781 | tactgtaaaa ataaataact caaaaactcc aataagataa agtgaaataa ctatgaaggt |
| 15841 | aaataactca gataataatt gtaaagataa ttaaaaataa attccggctg ggcgcggtgg |
| 15901 | ctcacgcctg taatcccagc actttgggag gccgaggcag ggggatcacg aggtcaggag |
| 15961 | atcgagacca tcctggctaa cacggggaaa ccccgtctct actaaaaatc caaataaaaa |
| 16021 | attagccggg cgtggtggcg ggcgcctgta gtcccagcta ctcaggaggc tgaggcagga |
| 16081 | gaatggcgtg aacccgggag gcggtttgca gtgagccgag atcacaccac tgcactccag |
| 16141 | cctgggcgac agagcgagac tccgtctcga aaaataaata aataaataaa taaataaatt |
| 16201 | ccaagcaaat taatttgaac atctgtaact cctaaaacaa aacaactaca tataaataac |
| 16261 | tgaaaatgaa caactaaata actttgaaaa taaagtaact ataaaccagt aactgaaact |
| 16321 | ataaaattaa ataaccagaa agctacaaag aaatgaaaat caactaataa aactaaaaat |
| 16381 | aaaatacaac tgaaactaac aaaactcatt taaaaactaa taaatcgata cataaaatac |
| 16441 | ctcagaaagt aacttggaac gaactctctc tacaacgaag caatcttggc actaacacga |
| 16501 | acaccccatg aacgctcgca gggatgctgg gaggcggacc gggagctccc agtctgcggc |
| 16561 | ccccgccggg ttKgagcggc tccggctcct ccaaggctcg ggctaagcgg ctctcaaccg |
| 16621 | attcccaccc cgccctggag aaatgcgggc gtgtctgcag gcatttttga ttgtcacgat |
| 16681 | ttgggggcgg ggtggaggat ggggtggcgc attcctggca cctagtgggt agaggccagg |
| 16741 | ggtgctacta aacatcctac cgtgggagca cagagaagcc cacgcagcaa agaattgccc |
| 16801 | ggctccgaat Rtcgaagtgc gcggtcgaga aggcgtgggc tgcgggctct gctcgcctct |
| 16861 | gcaggcgcct tagagcagct ccgaggtccc ccgtgcggag ctaggcgcgc acccaggaca |
| 16921 | cccctcgggc tcctcggagg aggccctggt tgtccccttt ctgccgccgc cgaggctccg |
| 16981 | gctgctttct gcgtagctgg gcagggcccg ggcccccaca ccgcctctcc cgggaatgcg |
| 17041 | ggcgctctgg agccgaggag cgggggcgtc cgcagggagg tcagctctcc tgggcggagg |
| 17101 | tcctcgggcg cagcgccctc gcctggaaac cagccgtcgc ccccgcagga gccagccggc |
| 17161 | ccgtggacgc cccagcgcgc tcctcctcgg tgctgcgggt cgccctgcaa ttccgagaag |
| 17221 | aaagtcagag acgccgtggc ccaaagaggc gcttagtctt tcctcgctca cactcacgtt |
| 17281 | tcctcctcat cgcgttcttc tttttctccc tggctgcttt ctcccctctc caggaaagca |
| 17341 | gatttggagg aacaggtttc gtgactgtcg tccgactgga aaaggcccgc gagctggaag |
| 17401 | ggaggggacg ggtgcaccct cagagttatt gctggaggct gtggccagac cgggcaaggt |
| 17461 | ggtgactccc gctggcaggc tgaggcccac cccagccctc ccacctgggc cacggggctc |
| 17521 | tcagcgggag ccccagttat gaccggacac cagcgcaccg ccaaggagac agccacgtgg |
| 17581 | ggacatgctg gactaggagg gtcagagcca gtttgagggt ctggtgacct cggctccctg |
| 17641 | gcttaaccag gtccttatgg gtgagaatcc tgaggagggg gagagggatg gaggctaggg |
| 17701 | acaggaggca ggaggagctg atgaatagga aggagggaag aagatgaaag aaacaaaagg |
| 17761 | gaagtaatta cactcagagc actgctctcc ttttccatgt cttctgcgcc ttcacagtct |
| 17821 | tcaaaggtgt ccatggagct aaactccctg ctggagcagc cttagggaga gaaagggaag |
| 17881 | gatggggcct ctgtggggtg ggaggacatc ccctctgccc atggcagggt gtagcaggca |
| 17941 | gtgcctgttg caggcacggt cctccccatc tctaactcct gctctccaag ggcctgcact |
| 18001 | gcgctgggct gtgagggggt ctgtgatctc caggctgctt ttccagcgcc gagatgccgt |
| 18061 | aattcaccga gaaggcgcgt ccacatgctg ttcatggccc tacctccccg ttcctccaag |
| 18121 | aaaacagtca ttgttttttg tgtttgccag tcttctaacc acgcctcctt cccttcctcc |
| 18181 | tcccctgtct ctttctcacc ctcccctcct tgcctccttt tctctcccct aattaatgtc |
| 18241 | catttcccat ctccctggca gcctctgcca agtgtcactg ctccccataa gggaaaatca |
| 18301 | gaggaacaag caagtgcatc catcctgcct ctctctgcag tgaactgatt aattaatcca |
| 18361 | tcagtcttgt ctatggcgca catgttacat ccctggggcg gtgttggaca ctgtggggaa |
| 18421 | cagcagccac tgccaaatac tgaacaactg ccctgtgcct ggtggtatgt taggcatttg |
| 18481 | tcaaagttta agcctcacaa ccctgtaagg gtctcagccc cctttacagt tggggaaaca |
| 18541 | gacagcaatg gtcacttggc caagtcctct tggcctgtgg cagggcagct gtcttctcca |
| 18601 | gcactcctgc tctttaccct cgctctgagt gagatggagt ctctgcccca catggctcac |
| 18661 | aagccagggt agggagcaga gcatctgcag aaaggtccca acacaggaca gccccagacc |
| 18721 | gagggtcagc tgagtagtct acgcggcggg agccgtgcta ggaaagtgtc tgctcaggcg |
| 18781 | agaattcagg gaggtttggg caggacttga ggggcagaca ggactggaga gggagggcat |
| 18841 | tctgggcaga ggcatggcca gagggcggta ggcggcagtg gagggagctg cagttatctg |
| 18901 | ggtgagcagg cagcacaagt Rgcgtctcct gggctgctgc cccaagcccc caacaagcca |
| 18961 | cgttctgggc cccaggccct ccccagagca gatcagtggg ggctgtgtga gtaacatggg |
| 19021 | ggcggggggg cagctgggca gcacctccct ggaggcccct ctgaaatcct gcctgactct |
| 19081 | ggcaggctcc gagggggctg gacaccctcc tctcaggttg aagcaagtcc tggttgagtt |
| 19141 | cctagtccca ggaggtggga ggggcaaggg gtggagggca gaggagaaac tgcctcaggg |
| 19201 | atgtgccccc tgccttcatc ctccagacag gacttgggag catctaagga aacccaagac |
| 19261 | tcctctttag agaagtcatc cagccctggg gtccccttat gccaggagca agcagtgaga |
| 19321 | atggaagaat gattgtcttg ctgaaagttc tgtgatggag ggatagaggg acagagggag |
| 19381 | ccatgccctt gaccatcccc tgcatgaata ggaagggctg tgtctccagg gtccatggcc |
| 19441 | tctgtgcccc ggatgatgcc agggctgcta gggaccatag agccacccac tgggaggctg |
| 19501 | gcggttgggc ctggctcagg agccttcgtc agccataggc agccacagcc tggggtgggc |
| 19561 | agggctggga ggcgacacag gaactgaaaa acctgacaag ctctagcccc tccgcagggt |
| 19621 | aagtggtacc tccaggtaaa atgattagtt Kgttccagcc cctctgcagg gtaagtggca |
| 19681 | cctggggtaa aatgactgcc tggagctggc agctgctttc cctgctctcg cgggccctgc |
| 19741 | agggaagcgg ggaagggaag ggggcacagc gctgggcaca gaggggctct cagaccctgg |
| 19801 | actcaactgt ttcagggtca tctgaaacag tcaactgttt cctctagccc attccctgcc |
| 19861 | tccaggcgag gatttgcctg aacgtggaaa gaggaaggat cctcccagtg ctgtcaaccc |
| 19921 | cagattccac ctccctgtgg gggactgtca gcgcaggccc tgacaacgca gagaaagaca |
| 19981 | caggacccac ctgggccagt gacagcagga gctccgggtg ccacaggtga gggtggggat |
| 20041 | gcctggagca ccacgggggg cctggtttag tctagagcca ggttttccat acaccttaga |
| 20101 | gtgcaacctc agggagatgc aaattttacc ccctaacaca gcatacacgc agaaacacat |
| 20161 | ttatacaatt caaacacaag cggacggaac aatatttacc cttagagtgt gtgaagtcct |
| 20221 | catctgtccc acctcatcct atcatgcttt gttctatcct aggagacaaa gcaggagggg |
| 20281 | gggctgcgga ggtgggggag tctcatccaa gcccttgggt gacacgtctc tcctgagaca |
| 20341 | aactgcagct gctctgggtg tgccctcgcc tgtctccctc caggccccgg gttcctgcca |
| 20401 | gcagagacag taacctattc accaggtatc ccccagggct cctggaagaa actcagaatt |
| 20461 | ctcagaacca gaaaacctta gagagcatcc tgcaggcaaa gcccctggtt ctctgcggag |
| 20521 | gaaagtgcgg ctcacagggt gccccgccag ggatggtaat tgacYaccag gctgtgtgcc |
| 20581 | ttgtggggac tggcttaagg ccctgtggga gctgagtcag ggccaggacc ggggtgtcct |
| 20641 | gactcctaga gatcatgttc ccttcctcac ccaggccttc cagtcccagc cctgggcttt |
| 20701 | tatttattta ttttggagac agagtctggc ttgtcaccca ggttggagtg cagttgtgtg |
| 20761 | atcacggctc actgcagcct tgacttcctg ggttgaactg atcctcccac atcagcctcc |
| 20821 | tgagtagctg ggaccacagg cacatgccac cacacccagc taatttttgt attttttggt |
| 20881 | agagatgggg ttttaccatg ttggccaggc tggtcttgaa ctcctgagct caactgatct |
| 20941 | gcccacctca gcctcccaca gtgctgggat tacagatgtg agccatcatg cccacctcct |
| 21001 | gggctgactt ttgctgtctt acatcatctg catatttaat cccctgctgg attcactggt |
| 21061 | catgggctct gaggccctaa gagtcttagg cactaaggag ctggcagcac tgaggggacc |
| 21121 | ccaaaatctc agactcagga tctggccagt cacaggcatg tgagggaaca actgagaggc |
| 21181 | ccattgcccc atggcaggag aaggtgctct ggagtcagtc agacctgagg gcagtcagac |
| 21241 | ctgattctca ctctgtcact cactagctgt gtgatcttgg atacatcact taacctcttg |
| 21301 | agcatcagct tccttatctc taaaatggag ataataacat cgattttgca gtcttggtat |
| 21361 | gaggattagc aaatcttctg ataaagaaaa atgcctggta catcatagga attcaacaaa |
| 21421 | tagtacctgt tatgattatt gtgtatagca attacaataa tactaaagag agggtctcaa |
| 21481 | aacagctctg ggcactccag gtgtgctatt attacttaca tttcagggag gtttgtctgc |
| 21541 | cattgtctca tcctcataaa cactcaggga aagaaacatt ataaggataa taaatggctt |
| 21601 | taaaaagaaa cagagcaaac acacacacac acacacccct cagaaaaacc atgccaaaca |
| 21661 | cacaggctct tgacaaatat tcaatctgat tatagcaaaa ctgttttgtt ttgttttgtt |
| 21721 | tttttgtttg tttttgagac aggggtctcg ctctgtcgcc caggctggag tgcagtggcg |
| 21781 | tgatcttggc tcacagcaac ctccttctcc cgggttcaag caattctcct gtctcagcct |
| 21841 | ccagagtagc tgggactaca ggcacatgcc actatgcctg gctaattttt gtatttttag |
| 21901 | tagagacagg gtttcaccat attggtcagg ctggtctcga actcttgatc tcaggtgatc |
| 21961 | cacctgcctt ggcctcccaa agtgtgagat tacaggcgtg agccaccatg cccagctgat |
| 22021 | tatagcaaaa ttctaagtga tagttgtatt cttggaaaat gaatggaacg acttttgtcc |
| 22081 | cagccaagat ctagtggtgt gttggagcag atacaccctg agtctctggg gcactctcag |
| 22141 | tctatgtatc agataagcat aaggagtatt ggtggagaag gacaagaatg ggaaaggtgg |
| 22201 | gcgatgagaa ttcctgcaga taaggactgg tgagagtatt ctcttttgaa acccttagtc |
| 22261 | gacaatcttt ctggtgcata tcagataagc tgaatggttt aggaaatcta gtgttcacat |
| 22321 | ttagtgctta gaattctaag cttttttatt ttgcttaaac aaatggaatg aaatttatta |
| 22381 | acaagtgaac ctagtaatga gctgaaatta ttctcaccag catacatatt tttggtaaat |
| 22441 | tatagacttt gaagacaaaa tcatggtgtt tcccttactg tccagtggat ggcacaaaga |
| 22501 | gaccattgta gatcctgctg gttcagcggt agctctcaat ccatagatat taaatgggca |
| 22561 | aattctattt ttattgtctt tcaaactaga tttttctcaa tgcacaactt tttttttctt |
| 22621 | tttctttttt ttttttgaga cggagtctcg ctctattgcc aggctggagt gcagtgacac |
| 22681 | gatctcggct cactgcaacc tccgcctccc gggttcaagt gattctcctg cctcagcctc |
| 22741 | ctgagtagct ggggactaca ggcgcatgcc accatgccca gctaattttt ttgtaatatc |
| 22801 | agtagagaca gggtttcacc atgttggcca ggatggtctc gatctcctga ccacgtgatc |
| 22861 | cgcccacctt ggccttccaa agtgctggga ttacaggcgt aagccaccgc gcttggccaa |
| 22921 | ttatgcacaa ctttttaagg accatctcta tcacatgaac taaaggatat cattttcact |
| 22981 | tgggggtggg aagtggtgag ctgcttaaaa gcaatgccta aaccccctgg gctttccttc |
| 23041 | ctttcacttg gaagaaccag ggggtaacta actgctaaca attccatgct ttcagagatc |
| 23101 | taggcgcaag cctaagggct tcatctcatt taatcctcat ggcaagactg tacagtatta |
| 23161 | tctccatttt gtaaaatgaa tgataaaaag aacttaagca cagacaggct atagaatcca |
| 23221 | tccaaagaga tggagctgca cttgaggctg ggtctttgag acctgagttt gagcccttca |
| 23281 | tcattgtgtt gtgtgtgctg ctaaccaatt tcccctctct gtcttctagg atttaataca |
| 23341 | tggtgtcaca ttctgtctga tccatcccag tagctctcca gagctcccaa caggagagag |
| 23401 | ttccaaaatg tttccagggg tactaggctc ggttacaata ttttgcttgg tggcccagag |
| 23461 | tataaacgtg gatatcttag gctggtctat agctgaaacg tctatttcat ttgcaagcct |
| 23521 | atctttggct aagaggaagt gaatcattct tgagaacatc taattaattg ctttcagatt |
| 23581 | ccacatgttg acattctcag ggcacatttt ttttttcccg tgcatttctg ttgtcaaagt |
| 23641 | ccctgccagc tcctaaggca gtctgagctg gctgtcttag actttcagag ctgctggaag |
| 23701 | cttgggggag ggaggggctg taggtcaaag aaactttata acctagcttt acctcccagc |
| 23761 | tcagccacca gctgccctca aatgttctgg attggaataa gcccaaagat gagtggcagg |
| 23821 | agggaagggc aagccaatac gtctagtttg gttcagtcaa agccttgccc atttcatcag |
| 23881 | aattttaatg gaaaatttcc aataagatta aaatataagg tcaccccaat tttagtatgg |
| 23941 | ctccatttaa aaaaaatcat gcatatcttt gttttgcaat ggggccttac tcttgcccag |
| 24001 | gagaggtgcg gtggtacaat catggcttac ggcagcctca acctcctgag ctcaagcaat |
| 24061 | cctttcacct tggcctgcca aatagctagg attacagaca cccaccacca tgcccagcta |
| 24121 | atttttaaaa aaaatttttt gtaggtccag tgcagtggct catgcctgta aatctcagca |
| 24181 | ctttgggagg ccgaggcaag cggatcacct gaggtcagga gtttgagacc agcctggcca |
| 24241 | caatggtgaa actgccgtct ctactaaaaa cacaaaaatt agcgaggtgt ggtggtgggc |
| 24301 | acctgtaatc ccagctactc gggagactga agcaggagaa tcaattgaac ctgggaggtg |
| 24361 | gaggttgcag tgagccaagt tcgtgccatt gcactccagc ctgggcaaca agagtgaaac |
| 24421 | tccgtctcaa aagtttttgt ggagatgggg tcttgcgata ttgcccaggc tggtctcaag |
| 24481 | ctcctggata tcaagtgatc ctcctgcttt ggcttcccaa agtgttggga ttacaggcat |
| 24541 | gagccaccac aactgaccaa atcatgcatt tctatagaca acgtctgcaa gaagatatta |
| 24601 | atggtgatta tatctggtta tgttggattt gtatttttat ttgtactttc ctgtattttc |
| 24661 | taaattcctg acattctaca tgtgtactcc tttaataatc agaaaaggaa acttaaaata |
| 24721 | gttaaaacca attggtcaga tatgtaaaat aacccaccat ctctccagag agggctgttt |
| 24781 | gctagaactt attttcttca ttgaaatact agagtgcccc aataagtttg aataacacaa |
| 24841 | aaaaaaagat aatgaaagta actaaattat ctaggcccaa aaggaaatgc cacaaaaatt |
| 24901 | ggcaaagaaa caaccatgac gtgctatacc ggatagctcc taggccccct tggagaccct |
| 24961 | gaggtacccg acgagggacc tgtagtaagg ctggcagaca ggttcttcct ctgttagctc |
| 25021 | tgaggtacaa cagttattct catttttatg tctttcacat ggccagaact ttgcaaatca |
| 25081 | gaggcaaagt gaattcagaa ttaaaaattt tcagcaccat ccaagtcagt aaaacagtct |
| 25141 | tagcttataa cctttatttt ttttattatt ttattatttt tttatttttg gatggagtct |
| 25201 | tgctctgttt ccaggctgga gtgcagtggc atcatctcRg ctcactgcaa cctccgcttc |
| 25261 | ctgagtccaa gtgattctcc tgcctcagcc tcccgagtag ctgggacgac aggcatgcgc |
| 25321 | caccacgccc agccaatttt tgtattttta gtagagacgg ggtttcacca tgttggccaa |
| 25381 | gatggtctca atctcttgac ctcctgatcc tcccgcctcg gcctcccaaa gtgctgggat |
| 25441 | tacaggcgtg agccaccgcg cccagccctt tatttttact gtaagctgcc agtaaacagc |
| 25501 | acacccacct gtctgctgac tgtcccatct ggaagttgtg taggtcctta ctgaatctta |
| 25561 | ccttcttccc ttcccctacc cagaccccat cccagctggc acgtggaatc ctttcccttt |
| 25621 | ctcctcatgt caatagacca gcaggcaaag agagcagtta ccatagtgga aggagaaacg |
| 25681 | ggtcctagtc gtggtgagga ggtagggctg ctgcttaaca Raggccgaga gggacatgtc |
| 25741 | tgatgctcag gtgatccact aggacatctc gcaatactcc catgcccagc tgtaactatg |
| 25801 | atggccaagt ccaagaacca tagcctgata agagtctagg acccccacta tacatgccac |
| 25861 | cagtagaagt gcctgatggg gagagggatg tctagaatga gtaggaggga atgatgacaa |
| 25921 | agcacagcca aggaccaact gcagtggcag gtggcagcca cagattgagt taagtaggat |
| 25981 | tcttgctgtg ttccctagtg gaagcatctc ccttgttgag acccactgag gttaaagttg |
| 26041 | gagacatggg gagaaaacaa tgtccccgtg ttcatcacta gagtcatgat gggcaaggtc |
| 26101 | acaactcatt tgacttcttg gctcccagat tcatatactc tgcctcttgg gggcacttca |
| 26161 | ccataataca gccattggtt cagttgtatg ctgcatcctg agggacagca ctccatcccc |
| 26221 | gcagtgccat gtccaaactg ctgccccgcc tcactctcaa gaggctgtcc cactactctg |
| 26281 | tcaggcacca gcttctgaat gcagtggtaa gactctgtcc tgtgatcacg tctatggctg |
| 26341 | attctctttt gccatactga gtcccctgat caaagcagtg ttatacagcc tggcgcgctg |
| 26401 | gctcatgcct gtgatcccag cactctggga ggcagagggg gatggatcac tagaggtcag |
| 26461 | gagttcaaga ccagcctggt caacatggtg aaaccctgtc tcctctacta aaaattcaaa |
| 26521 | aattagctgg gtgtggcatg agcctgtaat cccagctact cggaaggctg aggcaggaga |
| 26581 | atcacttgca cccaggaggt ggaggttgca gtgatccctg atggtgccgt tgcactccag |
| 26641 | cctgagcgac aagtgtgaaa ctctatcgca aaaaaaaaaa gcaacgctta tgattgatca |
| 26701 | cacactgtac tttctaacct gaaggggtct ggtaaaatca acttgtcttc tcaagggaca |
| 26761 | gtaccaaact gggggctcag cactgacctc tgctggcatg tcggacattt aaaagtggta |
| 26821 | gcagctagag cagtcttgaa gacatggagc cctcactgct ggggccgagc actgctgggt |
| 26881 | tcaattctgc taccaaggct tctccatttc cgagcccatg gtgcaggcac tggggtgcct |
| 26941 | aagaggaagt gcactaactg gacttctgct atgcaccttc tttagggggc attaaagcac |
| 27001 | agttcaaaga ctctcacatt ttgagttaac ccccacaggc ctgtgtgccC CttctcCagt |
| 27061 | caggtcatgt tgtcatttga tcctagttat tattctgaaa gggttcagga agggaggtgg |
| 27121 | ggacagatct tgRaaagggc aaacattgcc ttgtatgcct catctgaggc ttccgcatag |
| 27181 | tcttagggga ctgggaaccg tcttaagtga atctcacctt cttcccttcc cccagccagg |
| 27241 | ccctagccct actggcatga ggaatcctat ctctttgtcc tcatgccagg agaccagcag |
| 27301 | gcaaagagag cagttaccat actggaagga gaaatgggtc ctggtcatca gaaggaggta |
| 27361 | ctcctcaagg gacagtacct gagggagaca cttccactag ggaacacagc aagaatccta |
| 27421 | cttaactaaa tctacggctg ccgcctgctg ctacagttgg tccttggctg tactttgtag |
| 27481 | tacaaggcga agtaggccac tgctgccagc ccaggaggtc aagggcattt acccagacat |
| 27541 | cctcattccc agtttttggg tcccttatct tccctctcag gatctaatga ctcatctact |
| 27601 | ggcactagga gtccaaaatg accagatggc agactcgcct aggctgagaa ttcttccttc |
| 27661 | tctcaaattc tgccactttt accagcccag tctgcctctg ctgtaggaga tgagaggcta |
| 27721 | aatgttggca gggaggcccc ctgattctga tcctgtgttt taaatcgata attagtcYga |
| 27781 | ccctgttact ttctcccttc agtgcatcaa cgggaggctc ttagcaacag cctcccaact |
| 27841 | ctaccttcct gatagataat attttcctca aagctctcaa atgctagaga cattgcacca |
| 27901 | gctggYgtgt ccccatccac ctgtatctga tcccaggtca ccacaggtga aggtctgagc |
| 27961 | aatcgaactg ctacagcagg ccaggtacca ggactctcaR cacgccactt aacaccaata |
| 28021 | atgaggtcct catggccatt tggcctgcag tgagccaaca ccagaatccc atccattctg |
| 28081 | ggacccctcc tgctactaac ggtcttcagt caggttcccc agaagcagat tatgcaaatg |
| 28141 | tgttattgaa aaacggcttt cagatgaaac ctggaagaca gtgaaggccg aagctagggc |
| 28201 | agggaagaag ccaggcacag acgtgggctt agcagaagtc tagcatcagc ctgatcccct |
| 28261 | gggcagtact ggagcatgga tggcaccaca ggttaccatc ttgagacaga aggactggct |
| 28321 | tctgtaccct gaatcagtaa gccattggtg ggccataagc cacccttagg ggaggacata |
| 28381 | acctcacagg catttcctgg ctggacgacc ctgggcagct gagggcaact gcctgaaggg |
| 28441 | cacaacggtg agccattgtc agctaacctc acagcagcag agacatgggg ccaacagcct |
| 28501 | ataaagaggg tctgggcagg ctgtcaatac tctctactgt aatactgtat atgtggttta |
| 28561 | ttttaaaaac ttttttagaa ggctttattt tattttattt tttgagaagg agtttcgccc |
| 28621 | ttgttgccca ggctggagtg caatggcgcg atcttgactc accacaatct ctgcctcctg |
| 28681 | ggttcaagga attctcctgc ctcagcctcc cgagtagctg ggattacagg cgtgtaccac |
| 28741 | catgcccggc taattttttg tatttttagt ttcatcatgt tggcctggct agtcttcaac |
| 28801 | tcctgacctc aggtgatccg cccacctcgg cctcccaaag tgctgggatt acaggcgtga |
| 28861 | gccaccgcac ccggctgact ttattttttt agagcagttt taggttcaca gaaaaactga |
| 28921 | gaggaaggta caaagatttc ccatatatcc cctgtgctca cacatgcatg gcctccctat |
| 28981 | caccatcccc caccagagag gcacatttgt tacaatggat gaacgtatac actgaatata |
| 29041 | tcatattcac ccaaagtctg tagctcacat catggttcac tttggctgtt gtacattcct |
| 29101 | tggatctaga cacttttata atgacaggta cagtagtccc cctttatcct caggggctac |
| 29161 | ttccaagatc cccagtggat gcccgaaacc gcagagagtg ccaaacttga ctgccatcag |
| 29221 | tgggaatatg tttctattcg ccttccacca ccaccggttt aacgcctttt tcatcttagt |
| 29281 | gctgctgccg taactttggc agtttgagat gcgacagcaa aatgagtaca aatttctttc |
| 29341 | tccttcttca caatgtcatg gacagatgat tccttcttac catagatctt agcaacctcg |
| 29401 | gtgtgtgatt ttttttcttt cttgttaaat caactttcac cttttcactt aaaggaagca |
| 29461 | tttgacggct tctctttggc atatctgaat ttccagcatc acgactgtgc tttggggcca |
| 29521 | ttgtttgttt atttatttat ttattttatt tatttttttg agacagagtc tcgctctgtt |
| 29581 | gcccaggctg gagtgcagtg gcgtgatctc ggctcactgc aagctccgcc tcccaggttg |
| 29641 | acgccattct cctgcctcag cctcccgagt agctgggact acaggcgccc accaccaagc |
| 29701 | gcagctaatt tttttttttt tttgtatttt tagtagagat ggggtttcac tgtgttagcc |
| 29761 | agggtgatct cgatctcctg acctcgtgat cctcccgcct cagcctccca aagtgccggg |
| 29821 | attacaggca tgagtatttt atttatttat ttattttttc agacagagtc tcactctgtc |
| 29881 | ggccaggctg gagtgcagtg gcaccatctc gctcactgca acctccgcct cccaggttca |
| 29941 | agcaattctc tgcctcaaac tccggagtag ctagaattac aggtgcacac caccacgccc |
| 30001 | ggctRatttt tgtattttta gtagagacaa ggtttcacca tcttggccag gctggtctta |
| 30061 | aactcctgac ctcaggtgat ccacccacct cggcctccca aagtgctggg attataggcg |
| 30121 | tgagccaccg tgcttggcct tggggccatt attaagtaaa ataagagtca cttgaacaca |
| 30181 | aacactgtga tcctaacagt cgatttaatc accaagatgg ctataagtga ctaaggctgg |
| 30241 | cggggtgggg agcacagaca gcagggacac cctggacaag gggataattc gtgtaccaag |
| 30301 | caagacacag cggaaggcgc cagatttcat cgcactactc agaatggcat atcatttaaa |
| 30361 | actcatcgat tgtttatttc tgtaattttt ccatttgata tttggacagc agttgactaa |
| 30421 | gagtaactaa aacctggaaa gtgaaacagt ggataagggg gtgctcctgt acttctcaat |
| 30481 | gtgagacatt tgcccttcat gttaattctg ccccattagY tctacacaaa tgaatagcag |
| 30541 | gaaattgatt ttaaaccaca tggtggtaaa atgctttctt ttttctccct catttaacta |
| 30601 | aagaagggct gggccctagg tgatgtcttc cttagcatct aagcagctgg catcacccca |
| 30661 | ctgcttctgt gctccactct cccatgggac cctccctacc tttaatccct cctgtgctgg |
| 30721 | aggccgggtc ttccttgcta gtggtagctc tttccatatt tttaatccat ggtccggatc |
| 30781 | ctgctccact gcctttgctt tagagaaata aacatgaata ttgagtcact ggaaggaatg |
| 30841 | acacacgcat ccctccccca ccagttggag taacgctggc ccacctagtg tatctctggt |
| 30901 | ctaggtctcg aggacctgct gctcctccct cacctgtagt tgaagacctg cctcaggtca |
| 30961 | gtaggtgata cgcagtaagg aaatgtccaa aggacacttc ttgttggatt acacagcaaa |
| 31021 | catctaattg gctgcaaatc tttttttctt tttctttctt tttttttttg agacagagtc |
| 31081 | tcgctctgtt gcccaggctg gagtgcagtg gcgcaatctt ggctcactgc aagctctgcc |
| 31141 | acctgggttg acgccattct cctgcctcag cctcccaagt agctgggact acatgcgtgt |
| 31201 | gccaccacac ccagctaatt tttgtatttt tagtagagac gaggtttcac catgttggcc |
| 31261 | aggatggtct tgatctcttg accttgtgat ccgcccgcct tggcctccca aagtgctggg |
| 31321 | attacatggc tacaaatctt aaagggggaa gagatgagga ggaataatcc cctttgtctt |
| 31381 | ctcaaaaatg ttttcactgg ctcactacag ctccctcctt cctctttact gacccaaaat |
| 31441 | gccaactatt atagtaactc ttttgggtta gacgaatcca gtgaataaac acctactaag |
| 31501 | cattggaggt ccaagaggaa taagatatgc ctgagctaaa cctcatcacc cccggccttg |
| 31561 | cttgcagagt ggtttgctgg cctcatctga ttattcaatg agtgctttca tttgtttatt |
| 31621 | cactaaatat ttactgagca cctacaaaag tgcctggccc tggtagatga ggcctgaggg |
| 31681 | aagctaaaac taataagaca aactccatgc cctagaggaa ttcatggtct catagggaga |
| 31741 | aaatgtaaac acatcataaa attatagctt attaaatgct gcaatagagt actccgtaag |
| 31801 | agtgtggggg cagagaggag ggggagaaac agctgctttc tagagccctc accttttcca |
| 31861 | cttctctcat ctttctgggt tagggtctag cgggggttcc atgaggatca ggctaaatga |
| 31921 | gcttagaaaa actaagcaga ctactgtatc agaactggat cacagtagac aggcgttttc |
| 31981 | aacaaacata tattgagtat ccctgagtgc tttggacagg aagaggaatt atagacgaag |
| 32041 | attgtaagtc gcagtaatag atgaggcaag gagcaccagt gaggacttaa ccctgaaaga |
| 32101 | agtgtgagca catcttcctc ccagacaagg gggaataaag aaaggaagat gatcaggaga |
| 32161 | gttctaagtg gaactcagca gccagagggg aagcYggagg aggtaacatc agagggtgcg |
| 32221 | tttgcccact cagtaaagta ggaggcaggg cagccttgtg aaaataggaa tggaatagaa |
| 32281 | agctcaagaa aacagccaaa agcaagggca attaggggag gtttcgaact ggcagatcta |
| 32341 | cctcaactgg caatacagca agcatgcacc agaaaagata tcctagctag cagtggggtt |
| 32401 | gggaactgat ttaatatcct aggctagcag tggggttgSg aactgattta ttatttaatt |
| 32461 | ttttatatct attcatgtat ttatgcactt atttattttt gagataggct ctcgctctgt |
| 32521 | cacagaggct agagtgcagt gatgtgatct aggctcactg cagctttgac ctcctgggct |
| 32581 | caagtgatcc tcccacctca gcctcctgag tagctgggac tacaagcacg ccaccaccta |
| 32641 | ggctaatttt tgtatttttt tttgttagag acagggtttc accatgttgc ccaggctggt |
| 32701 | ctcaaactcc tgggctcaag cgatccatct gccttggcct cccaaagtgc tgagattaca |
| 32761 | ggcgtgagcc actgcgccca gccaatattt tttaaaaatt ggaaatccct tgtaataagc |
| 32821 | caagtgttgg gggaagaaaa gcaataaaag caatgacatg gactcaatat gaaacatcca |
| 32881 | aagcatttga catgccttta aaataaaaaa atcagtactc acctcgtgct catttcaaac |
| 32941 | tgtggatttc cttggtctaa aattttaaaa aacaaaaaac agcactctca aatttaagct |
| 33001 | aatttgaatt gattttacat agtgattttt aaatacacat atatgcataa agagaatact |
| 33061 | ataaaaatat ataaaggtgt gtaggtcttg atcatatttt cccaggaatt cagaaaacgc |
| 33121 | tgctacagtc cctgggctca cgtggtcctg gcatcctccc caacgtctct accccatcct |
| 33181 | gctgagtttc tggcatgcat tggttctggg tctgtccaag tttctactgt tagctccatt |
| 33241 | aatactgaat taaggaataa acagtgctca aatgctcatt ttttccatgt gagcccaaat |
| 33301 | tatgtgactt gatgagggaa aaaatcatga gtccctggga gagcgataag aatcacattc |
| 33361 | tttactaaag tgttgtccca ggtatgagaa taacaccaga tctcaacctc cagaggcccc |
| 33421 | ccactgcctc ccacagcata aaagccaaat tcctcggccc gatatttgag gccatctcaa |
| 33481 | tctttttcct ttcaccctat acctgactct cccaggctag gctcagatcg tcactgaatg |
| 33541 | tgctcacttc gaggcacctc tgtgattttc aaggttcctg ggcccacctt ttactaccga |
| 33601 | tgtgactgcc acatgttgcc cagttgctag gatgggaccg tggccttgat ttctgccggg |
| 33661 | actgaggctt tgccttgttt cccacccacc ctgctgcctg cccctgcact cttctggctg |
| 33721 | gggcctgatc tttccccgca gtctcccttc acctctagat cacaggcagt catgccacag |
| 33781 | ctgaggagct tgtcccaaac ctcagtgcct gcctccctcc tcggcttctt gtgctgctgt |
| 33841 | gtctcaccca tcagtgaYgc tcttctcttc cctgcccaag ccctagctga ctccataaca |
| 33901 | cctggataca atgtcctctt ctgtctggtt acctccgaga ggccctctct ctacatccct |
| 33961 | cattggctcc cagtgtcatt cctctcaccc atggccctaa ggtcactgta ttctttggcc |
| 34021 | agtgtacagg gttattatgc ttaacaatcc acaaaggttg aaaggtgttg taggatggtg |
| 34081 | taaaaatgaa tctgggtggt aatgtttata tgtcagagct ttgtaaagtg ctcggcaggc |
| 34141 | gtaaggtact gacagtcctg atattcctga tcttggaacc tgggacacca tcttctcaac |
| 34201 | attgcccgga taccctcaag ggtatccaga cagcctgagt ttgcattctg ttcctggttc |
| 34261 | agcccagggc cctggttccc gctcactcac catccactgt gggccctctc taaattctta |
| 34321 | aagcccttgc catttgcatc actcacagag acatttcatc agagcctact tggtgcacca |
| 34381 | ggctcaggag actcagttct gctgcggata agttatgtaa aattgaccct ctgcttgcac |
| 34441 | atctgtaaaa ggaaggggct ggcacaacac ctctgggcct ttcagttcag tagtgttttc |
| 34501 | tttttatcta aaccacgtgc tgggtcctgg ttttgcttct tatctagatt tttgcattcc |
| 34561 | tgtcacaacc tataaagcac agttcaggcc ttaaggaggg cttgagaaat ctctttccga |
| 34621 | attgtcaact gaataagtgt catatcttca taacaaactt gtcttttttt gcagggccag |
| 34681 | gaaggcagca ggggagtcag ttaaaatata aattttagat taagcttaat attgttaaga |
| 34741 | agtcaattct caccaaattg ttctagagat tttacataat cctaatcaaa atctcaataa |
| 34801 | ggttttttga gaagttggca agcagattct aaaatatata tagaagtata aaggacacag |
| 34861 | aataatcaaa acaactttaa aaaggaagaa caaaattata ggactctaac tacctcattt |
| 34921 | taagacttat tagaaagcag cagtaaccaa gatagtgagg gactgatgtc aaggtagaca |
| 34981 | aatagatcaa tggaaaagaa tcaggcatcc agaaatagat gcacttacat aaatcatcaa |
| 35041 | ttggagaaag aatagtgttt ttaacaactg gcaatggaaa aactagaaca tcagtatgca |
| 35101 | aaggactgaa ctttgatcca tacctcacac cacatacaaa tcaaaaacag aaacaaacaa |
| 35161 | acaaacaaac aaatactcaa aatggatcag agacctaaat gtaaaactat aaaacttctg |
| 35221 | gaagaaaaca cagggagaaa atctttatgg cttttagata acgatttctt aggcaggata |
| 35281 | ccgaaaacat gatacataca gtttttaaaa ttaaatatta taagaattaa agtcttttgc |
| 35341 | tcttcaaaag tcactcttaa gagaaaaaga tgccacacac tagaagaaaa tatttacaaa |
| 35401 | gcattaaaag gacatatatc taggatatac ataaaaactc tcaaaagtca ataataagaa |
| 35461 | aacaatgagc aaaagatttg aacagacact tcaccaaaga agagataaag atggcaaaga |
| 35521 | agcacataaa gagatgctca accattagtt actagggaaa agcaaattaa aacctaatga |
| 35581 | cataccacta tgcccctatt agaaatctga aaatttaaaa gactgacaat accaagtatt |
| 35641 | ggtgaggaca tggcacaagt ggaactctca tacattacta tgggaatgga agatactata |
| 35701 | atcactttgg aaactattta gaaatttcct aaaaaattaa acatacacct accatatggc |
| 35761 | ctaaccatta cactcttagg tatttaccca agagaaatga aaacacatgt ccacacaaag |
| 35821 | acttgtactt gcatgttcat agcagcatta ttcaaaatag ccccaaagca gaaacaaatc |
| 35881 | ggatgttcat taacaagtaa atggataaag aaaacggggt ctagccaaac aatgaaatac |
| 35941 | tactcagcaa caaccaaaat atgtactatt gtttacaaaa tccaaataga tgaatctcag |
| 36001 | aataattatg cagaggagag aagccagacc aaaaaaaaaa gtacatagtg tattatctct |
| 36061 | tatgaaattc tagaaaatgc aaactaacct atagtgacag aaaggagatt ggtggtcacc |
| 36121 | tggggtgggt gagggagggg caggagaaag ggaatgcaaa gcagtgtgaa caaacctttg |
| 36181 | gcggtgatag gcatgttcat tatccttact gtggtgatgc cttacagatg tatacagatg |
| 36241 | tcaaaactta tcagattgta cactttaaat atgtgtggtt tatcgtgtca ttatacctca |
| 36301 | gtaaaggagt tttaaaaatt gtagtaaaag gtctctacct agaaacctta ataagctaaa |
| 36361 | atgtatgtcc ccaggactaa ccctagctat tctatagttc tggggtggaa cctagaaatc |
| 36421 | tgcatttgta gcaagccctt caaataattt gaatgcaggt ggtccttaaa ccaccctttg |
| 36481 | agaaacactg acctagtgag taaggatttc taaacaagct tgtgactaga atgttgtttc |
| 36541 | tgcagggaac aagtgacttt ttctactaga gttgccatat cattctgtgt taagcctcta |
| 36601 | ggacactcct actcaattac catgacatat atttaacata atattaatag ttgtaaaaca |
| 36661 | aaagtaaacc atagtttttt tcccatctta tctgtataca aagtaaaatc aatgacataa |
| 36721 | tattgttact agttcctggc agttacctac agtttaaatc aagaacttat gttgcttggt |
| 36781 | ttttgtgaca gaaaactgat gtggtggctt tccagttaca ctgcttggtt taccttttcc |
| 36841 | cttatcttat gatgcacacc cagctttgca cgttcctgag cagctgatga tcatagaaga |
| 36901 | cctagaaaaa gtgtgagcca gttgcattcc tgctatctct aaagaaaaaa gttatctttt |
| 36961 | catttttatg tgatttttct tacccaaaat gcaaaccact gccagtataa atgatggaag |
| 37021 | atagactttc cacatgaaac tggcatttct tcaccctagt aacattacct gaggggaagg |
| 37081 | tcagaactca attgataaag ctcgctgtgg attttcccac caaatatccc tgcaaacaaa |
| 37141 | gtgaaaggat aaagcctgct taaagatgat ttgtaattgt tgaaaggagt acagtgtgtg |
| 37201 | acatcagtga aaatggtgga gaaaaaaccc gtccccaaat tctcttcttt gtgaaagcat |
| 37261 | ggaaaaaact ggccaaaaat ggttagaaaa tttattttca gaatatcgaa attttttttt |
| 37321 | cctttttttt ttttttatta tactttaagt tctagggtac gtgtgcacaa catgcaggtt |
| 37381 | tgttacatat gtatacatgt gccatgttgg tgtgctgcac ccattaactc atcatttgca |
| 37441 | ttatgtatat cccctaatgc tatctatccc ttccccctcc ccccacccca ccacaggccc |
| 37501 | tggtgtgtga tgttccctac cctgtgacca agtgttctca ttgttcagtt cccacctatg |
| 37561 | agtgagaaca cacggtgttt ggttttctgt ccttgcgata gtttgctcag aatgatggtt |
| 37621 | tccagcttca ccatgtccct acaaaggaca tgaactcatt gttttttatg gctgcatagt |
| 37681 | attccatggt gtatatgtgc cacattttct taatccagtc tatcattgat ggacatttgg |
| 37741 | gttggttcca agtctttgct attgtgaata gtgctgcaat aaacatacgt gtgcatgtat |
| 37801 | ctttatagca gcatgattta taatcctttg ggtatatacc cagtaatggg atggctgggt |
| 37861 | caaacgatat ttgtagttct agatctttga ggaatcgcca cactgtcttc cacaatggtt |
| 37921 | gaactaattt acagtcccac caacagtgta aaagtgttcc tatttctcca catcctctcc |
| 37981 | agcacctgtt gtttcctgac tttttaaaga ttgcctttct aactggtgtg agatgttatc |
| 38041 | tcattgtggt tttgatttgc atttctctga tggccagtga tgatgagcat tttttcatgt |
| 38101 | gtctgttggc tgcataaatg tcttcttttg agaagtgacc gttcatatct tttgcccact |
| 38161 | ttttgatggg gttgattttt ttcttgtaaa tttgtttaag ttctttgtag attctggata |
| 38221 | ttagcccttt gtcagatggg tagattgtaa acattttctc ccattctgta agttgcctgt |
| 38281 | tcactctgat ggtagtttct tttgctgcgc agaaactctt tagtttaatt agatcccact |
| 38341 | tgtcaatttt ggcttttgtt gccattgctt ttggtgtttt agtcatgaag tccttgccca |
| 38401 | tgcctatggc ctgaatggta ttgcctaggt tttcttctag ggtttttatg gttttaggtc |
| 38461 | taacatttaa gtctttaatc catcttgaat tcatttttgt ataaggtgta aggaagggat |
| 38521 | ccagtttcag ctttctacat atggctagcc agttttccca gcactattta ttaaataggg |
| 38581 | aatcctttcc ctatttcttg tttttgtcag gtttgtcaaa gatcagatgg ttgtagatgt |
| 38641 | atgatattat ttctgagggc tctgttctgt tccattggtc tatatctctg tttttggtac |
| 38701 | cagtaccatg ctgttttgat tactgtagcc ttgtagtata gtttgaagtc aggtagcgtg |
| 38761 | atgcctccag ctttgttctt ttggcttagg attatcttga caatgcaagc tcttttttgg |
| 38821 | ttccatatga actttaaagt agtttttttc caattctgtg aagaaagtca ttggtagctt |
| 38881 | gatggggatg gcattgaatc tataaattac cttgggcagt atggccattt tcacgatatt |
| 38941 | gattcttcct atccatgagc atggaatgtt cttccattgg tttgtgtcct cttttatttt |
| 39001 | gttgagcagt ggtttgtagt tctccttgaa gaggtccttc acatcccttg taagttggat |
| 39061 | tcctaggtat tttattctct ttgaagcaat tgtgaatggg agttcactca tgatttggct |
| 39121 | ctctgtttgt ctgttattgg tgtataggaa tgcttgtaat ttttgcacat tgattttgta |
| 39181 | tactgagact ttgctgaagt tgcttatcag cttaaggaga ttttgggctg agacgatggg |
| 39241 | gttttctaaa tatacaatca tgtcatctgc aatttgacaa tttgactttc tcttttccta |
| 39301 | attcaatacc ctttatttct ttctcctgcc tgattgccct ggccagaact tccaacacta |
| 39361 | tgttgagtag gagtggtgag agagggcatc cctgtcttct gccaggtttc aaagggaata |
| 39421 | cttccagttt ttgcccattc agtatgatat tggctgtggg tttgtcataa atagttctca |
| 39481 | ttattttgag atacgtccca tcaataccta gtttattgag agtttttagc atgaagggct |
| 39541 | gttgaatttt gttgaagacc tttactgcat ctattgagat aatcatgtgg tttttgtctt |
| 39601 | cggagaacac tggaaattaa atgatggctt gcagcaatct ggagagcatt tattcaagga |
| 39661 | aaatggctgt gtctcagtat gactaatgag ctttttaact tgccctattt ctatcctccc |
| 39721 | cttccttggt ggtagcctta gaaatgaaca gcctgcaatg atagtgaaaa tcagcagtct |
| 39781 | ggcagccatg ggaggggcag aacaggaatg ggggaactat ggagcctcat tcttagagaa |
| 39841 | ttatcattat ttgatctgtc cacgggtttc taggaatacc tgacctgcaa gtctgtcttt |
| 39901 | attaggcctg actcagaact tgcccaatgt gaaaagtctt ttccccaaag gcctttgtag |
| 39961 | aaaatgatta caggcaattg tttaacttct tggttgctcg aggtattggc taacagtggg |
| 40021 | gcaaacatgg gctaatcaga aggtttaaaa tgaaatgctc aggaataaga tgctcataga |
| 40081 | gggttgtaaa ggctccaaaa tatttatgag actctagaag accatgcaca catttcctgt |
| 40141 | gaacatgttc aggacagatc tgcgaaggcc ccacgatctt acctctggct gatcttgatg |
| 40201 | atctgcacaa acagaaagtg aaagctaggc tagaactgtc aagtgccagg ctgagtgtga |
| 40261 | aggtgtgccc taatgtgcac acagagcccc ttggcaaaga ctagaagact tactgctttc |
| 40321 | aggtgtttaa agaaatctct gtcatgtcat tagtatttag atcactaagc taactgaaca |
| 40381 | gaggcttcaa tggctgcaca taaatacaga cttcacagaa ttagtttaga aaagtcacta |
| 40441 | taacaaacaa caataaacag caacaccaac aaacagtaga ggtgggaagg tccaatttcc |
| 40501 | agagttgcta cattatgtta tttaaaatgt gcaattttaa cagaaaataa tgagacatgt |
| 40561 | aaagaaataa gaaaatgcag tccataccca gggaaaaaga aaaaccagtc aatacaaact |
| 40621 | gttcctaggc caggtgcagt ggctcatgcc tgtaatccca gcactttggg aggccaaggc |
| 40681 | aggcagatca ccagaggtca ggagtttgag accagcctga ccaacatgtt gaaaccccat |
| 40741 | ctctactaaa agaaaaatac aaatttagcc aggcatggtg gcgtgcacct gtaatcccag |
| 40801 | ctactcggga ggctgaggca gaagaattgc ttgaacccag gaggcggagg ttgcagtgag |
| 40861 | ctgagatcat gccattgcac tccagcctgg gctacagagc aagactctgt ctcaaaaaag |
| 40921 | aaaaaaaaag aaaaaagaaa aaactgttcc tgaggaagcc aagatactga ctttactaga |
| 40981 | ccaatacttt aactattttt acatgttcaa aaagttaaag gaaatcatat ataaagacta |
| 41041 | aaggaaagca caagaacaaa tcctcattaa atagaaaata taaagatttg ttttaaagga |
| 41101 | cgaaacagaa attctagatt tcaaaagtat aataattgaa tgagaaattc actagagtgg |
| 41161 | ctggctcaat agcagatctg agcaggcaga agaaagaatt agagaactca gaaataggtc |
| 41221 | aattgaatct atccagtctg aggaagagaa agaaagagga atgaaggaaa aatgaataga |
| 41281 | gcctcagaga ctgtgagata ccttcaagca cgctaatgac gcataatggc agtctcagaa |
| 41341 | ggagagaggg ataaatgggc taaaataata tttaaagaag caatggctga acatttccca |
| 41401 | aatctgatga aaacattaat ctataccttc aagaaagtct ataaactcca agaaatataa |
| 41461 | attcaaagag atcaagatcc acacctagag ataacataat caaactgtca acaaagacaa |
| 41521 | tgaaattatc ttgaaagcag caagcacata gaaggactct tcaataagat taacagctga |
| 41581 | tttctatcag aaatcacaga gttgagaagg caatgggatg acatattcaa agtgcttaaa |
| 41641 | gaaaaagagg gtcaacaagg aattctatac ctaaagccaa tttatcttca acaaagatgc |
| 41701 | caagaccatt caaagYgggg aaagaatagt cttttcaatc aatggttcta ggacaatgga |
| 41761 | tatccacatg taaaaaaagg aacttgggcc cctaattcac atcatataca aaaattaact |
| 41821 | cggaatgagt caaaggctta actgtaagag ttaaaactat aaactctttg caaagaacac |
| 41881 | tatcaagaga gtaaaaagac aatgcacagt atgggaaaaa atacttgcaa ataatatatc |
| 41941 | tgataaaagt ccagtatcca gaatatataa ataactctta caattcaacc ataaaatgac |
| 42001 | aagccaatta aaaaacatac aaatgagtta actgacattt ctacaaagaa gatataccaa |
| 42061 | tggccaatat gcatgttaaa agatgctcaa catcactagc catgagggaa atgtaaatca |
| 42121 | aaatcacaat gagatactag tacatgccca ctaggatggc aatgataata ataataataa |
| 42181 | taataatgtt attataatga acaatacaag tgttagtaag gaaatggaga aaattgaacc |
| 42241 | caactattat attgctggtg tgaatgtgaa atggtggtac tgttttgaaa gatgatttgg |
| 42301 | aagttcctca gaaagttaac aaaagttacc atatggtctg gcaattctac atatatacac |
| 42361 | caaagaaaac tggaaataaa gattcataca aaaatctgta caaaaatatc tacagcagct |
| 42421 | ttacttacag tatccaaaaa ggggaaaaaM cccaaatctt catcaactaa tgaatggata |
| 42481 | aacaaagatg gtatatccat acaatggact gttactcagc cataaaaagg tatgaagtac |
| 42541 | tgatagatac tacaacataa atgaaactta aaaaaatacg caaagtgaaa gaagctagac |
| 42601 | agaaagggcc atatatgtga tgtgtagaga aaacatccaa tagagacagg aaatacatta |
| 42661 | gtgattgcca ggggctgggt aaaggtgaga gatggagaat gattgctaat tggtacagaa |
| 42721 | tttttttgtt gggagagtta tgaaaatatt ttggaagtat aattagaatt aggctgttaa |
| 42781 | atactttaaa acaaaaaaca gctgggcgca gtggctcaca cctgtaatcc cagcactttg |
| 42841 | ggaggccgag gcaggcagat cataaggtca ggagatcaag accatcctgc ccaacatggt |
| 42901 | gacaccctgt ctctactaca aacacacaaa ttagccaggc gtgttggcgc gcctgtagtc |
| 42961 | ccagctattc gggaggctga ggcaggagaa tcacttgaac ctgggaggca gaggttgcag |
| 43021 | tgagcccaga tggtgccact gcactccagc ctgggcgaca agagcaaaaa ctccatctca |
| 43081 | aaacaaaaca aaacaaaaaa caaaagtaag aagtaaaaaa atagaattag actggggatg |
| 43141 | gttattgagc cttgtgaata atctaaaacc cactgaattg tatattttag acagtgaatt |
| 43201 | tgatggcatg ttaattatat cttgatgttt taaaaaaagt agtacagtgt ctgaaaggta |
| 43261 | gcattggcca tttgaatctc tgttaacatt ttcttgggtg gccatcagat ttttgattaa |
| 43321 | aggtgacctt ggcaattaag tggtgggggg aacacaacca aaagggacaa accaacacaa |
| 43381 | ccacacacaa tcacacaacc cctccacctc caccacagtg gaaatcaagc ataggtgctt |
| 43441 | ccagggactg tgaaaatgtg gccacagttg ttttcccagc aaaccatttt ctttcacaat |
| 43501 | atccccaatt tgcacatccc ccactgagct gaaatcagta taactcgaca gacRaaagtc |
| 43561 | agcaggggta acctaccttt gatattattt tgttgttcca tcaataattt acttatttct |
| 43621 | gaaaaccaac agtctctgat ttcttttgaa gctgcctgca atcacacata agaaaacact |
| 43681 | ataagactac catgagtatt aattgcagag tttttattct cccagtgacc gttagactaa |
| 43741 | tgagatagaa aacacttgtc aagtcatggg aacacaataa ggaaagagta gaggagaccc |
| 43801 | atggggaagg catgagcgtt acctgcagga tgtatttctc aagtccattt cgactggcaa |
| 43861 | tctcaaactt tctatggctc ccccttccaa gctggcgaat tgaaagtgtc atcagctatt |
| 43921 | ataaagaggg aagagaaatg ttctatacca tcgttttctg attttaaaat agtccctgtc |
| 43981 | aatcactcta atcctttcta tccttgacag ctctcttctt tcatcttcct ttcaagtttt |
| 44041 | tgctttcctc tcttaatgac tccaagacag cataaaacac aatctggtac agtgtcttct |
| 44101 | gtctcatctg tttcagaagg taacacagac tgttaacttt ctactgtatc tttatgcagg |
| 44161 | aggcgctgca gccctcaacc tttcagtgaa gagatcattt ctccttcaac Rtgtatttta |
| 44221 | caactttcta cgtaatagta actgaataag gatctattca gaaacataaa taacaaggcc |
| 44281 | aggtatggtg gctcatgcct ctgtaatcag tcctgtaatt ccagcacttt gggaggccta |
| 44341 | ggtgggcgga tcacctgagg tcaggagttc gagaccagcc tgaccaacat ggtgaaaccc |
| 44401 | tgtctctact aaaaatacaa aattagctgg gcatgctggt gcgtgcctgt aatcccagct |
| 44461 | acctgggagg ctgaggcaga attgcttgaa cccgggaggt ggaggttgca gttagccaag |
| 44521 | atcatgccat tgcactccag cctgggcaac aagagcaaaa ctctgtcgaa agaaaagaaa |
| 44581 | gaaagaaaga caagaaagaa agacagaaag aaagaaagga aggaaggaag gaaggaagga |
| 44641 | aggaaggaag gaaggaagga aggaaggaag gaagggaggg agggagggag gaaggaaggg |
| 44701 | agggaggaag gaaggaagga aggggagaaa gaaaacaaag gctactatga acaaattaac |
| 44761 | agctttaatc acaaSagcat aaatatatat gggtgtggct cctgtatgtg ggtgtgtgtg |
| 44821 | tttcatagcc tgagagctaa ctggctatga aacagtttct aaacaggtga gaaaacaatg |
| 44881 | cttggtgtgg gcctgggtgc cttagacccc aaggtcagga caatgcctgc acttagacac |
| 44941 | aaagatacac cgttgagaag gRcaagtcta agatgaaatc cagcccatgt tctcatcact |
| 45001 | aagtctttca actctctttt acctctttgc ctggaagaaa gagggtactt ttactaatta |
| 45061 | gtttgtccag actggctgcc atatagtctt ttttctctag tacaaaggca ctcctatgcc |
| 45121 | agccctggcc cataagctct gaccctggag tcagacagac ccggctatgg attctagccc |
| 45181 | tgtggtgtgg tatttggcaa gttaacttca cctctctaca ctgcagcttc ctcatctgta |
| 45241 | aaataaggaa aacgatctct ctcttttctg catagggcga ctcccagatg caataggact |
| 45301 | ccctttacct tcatggYctt cttgaagctg taatgaggag ataatccctg gtccccaggc |
| 45361 | tccattcgta tcttacagaa cactattccc ctttcaaata ggtagatttg cctctggctg |
| 45421 | ggtttaaatc gaatcaaatc cttcatttta taacgatcct tgtgaattgt ccagacgctg |
| 45481 | aaagggccgt gcagcaacag cttgcctagt tttccaatat cgtccttttg gaaacacaca |
| 45541 | tacaggaaaa gaagctgtaa aattacttga cagagaaaga agcctttgtg gcctgttttc |
| 45601 | aaattttata aagcatgctt ctttgaggtt tacaattcta aaagtgctat tcaggctggt |
| 45661 | ctgtcactaa atcaaaacga caattttttg agcttcactg agcgtggtgc cRtttagtta |
| 45721 | tataaggaaa tcaattcagc tatgaaaggt aatgctatac ataaagaatg ttagaaatgc |
| 45781 | ttgagctaga gatacgggga ctgtgatatt tttgactcaa ttttaactag cagaattcaa |
| 45841 | tttcctctgt gctatgtttg atacatgaca gtctccttca aagggacaag aaattaacat |
| 45901 | ttcaattatg tccagtagag atagaatttt ggctgcattg Yggacccatg agcatctgtg |
| 45961 | tgttccatct gcatcctaac ttctgcttca ggtatatgag gacctgagaa aatgaagctt |
| 46021 | gttctgaaaa gagaaagttt actgtgatct aatcttcaca acattgtaat ggaaatagta |
| 46081 | actgcattca actctgagtt tttcagagtg agtcaacagt gccaagataa taccaaatga |
| 46141 | cagattttta agaagtctgt ttgactctag gcataaactg tgatgcccct gtctccacca |
| 46201 | gcaaggctgc ctttgtcata tgtctggttg aaagtccaaa tgagatgacc ctgccttctc |
| 46261 | tgagctctct tcaaaagaca gtggaccaag atgagctggg agcgaggcat tttatctggt |
| 46321 | atttttcaaa acttcgattg cttaaagcag ataagaattc atttccctga ataaaaacac |
| 46381 | caaaaggaac aaattatttg aaggggacca agacaaagaa atctccctaa gtgacctcta |
| 46441 | gctgagatca atccctatga tttctgagtt aatactggaa atatgtactt cattcataat |
| 46501 | tgattgggca tttttataaK ttattgttta tatgttgggc aaactctagg tatctttttt |
| 46561 | aaaaaggaat tgactttact tctgaaacat taaaagaaaa acttcaagag caataaactc |
| 46621 | tagtcatttc tatggtgtct atggcgttat ttcctatgtt aattttctat tttcttcttt |
| 46681 | ggaaaattta catatgtaga ctgtggtgaa taaaaccctc aaactcccag ccacgaggcc |
| 46741 | ttctttccta aaagccaatg ctcctgttct gtgttaacag ttcaccacat tccaaaacag |
| 46801 | aagggtggat aggtccatga ggaccctgga gaattttttc actctatctg catccatcaa |
| 46861 | ggacccactc aaatgtaatc actacagacc ttagtgactg ctttttcctt taaatccatt |
| 46921 | caattcataa tcaatatcga cataaatagt gcaggaaata tgttttagta aaggcaactg |
| 46981 | gtagaagtag atacttaata tttgccacat aaacaaatgt tatcagcaca ggttgagcat |
| 47041 | ccataattta aaaaatctga aatcctccaa aatctggaac tttctgagaa ccagtatgac |
| 47101 | actggaggtg aaaaattcca tacctgacca catgtgatgg gtggcagtca aaacacagtc |
| 47161 | aaaattttgc ttcaYgcaca aaattatttt ttatttttta tttttttgag acggagtctt |
| 47221 | actctgttgc caaggctgca gtagagtggc acgaccttgg ctcaccgcaa cctctgtctc |
| 47281 | ctgagttcaa gggactctcc tgcctcatcc tcccgagtag cttggattac aggcgtgcat |
| 47341 | taccatgccc ggctaatttt tgtattttta gtagagccag ggtttcagca tgttggccag |
| 47401 | gctggtctcg aactcctgac ctctggtgat ctgcccacct cagcctccca aagtgctggg |
| 47461 | attacaggca taagccactg ctcccggcct tcatgcacta aattatttaa aatatgtaaa |
| 47521 | attaccttca gtctatgtgt ataaggtgtc atgaaacata aatgaatttc gtgtttacac |
| 47581 | ttgggttcca tctgcaacat aactcagtac gtatgcaaat actccaatcc tcccctaaaa |
| 47641 | aaaaaaaaac tccaaaacac ttttggcctc aagcattttg gctaagggat attcaaactt |
| 47701 | gtagtttcta tcttacaatg tattcactct ctacctcatt ttaaacattc gacgcatctt |
| 47761 | acagaaatat atacagtata gacagataga aaataaccga gggaattaag gtgaagaaaa |
| 47821 | aataaagaag ttgggagctt ggcgcctgcc tgtagtcgca actacttggg aggctgaggc |
| 47881 | aggaggatca cttgagtcca ggagtttgag gccagcctgg gcaacatagg gagatcacca |
| 47941 | tccctaaata taaagacaat aaatcagatg aactgttcca gaaggtgtag aagataaaag |
| 48001 | aaaagatgaa gaggttatat gtaaaatgca tataataaag ccatKtaaac ttgatgtaaa |
| 48061 | cttggctctg actttctaat agcaatacag agggaaacat ggtgagtggt acgatttatt |
| 48121 | atgtctgaag acatacacaa accggttgtt caggaaaagc acagctattc ctactaagac |
| 48181 | ataagaaaca tttctcccag tgatatgttg tcactgagca acatcctcaa ccacgcccta |
| 48241 | tgatagaaag aggaacatgt tttaggtaaa gctgcttgta agaacacatt tggtcagtgt |
| 48301 | ggaggctcag ctgtcaaagt aattctagaa gaggctagga tgatagggga agggggaata |
| 48361 | agtcgaggtg tacactctct aatgacttgt gaagatgggg tgacgtgagt taaggcatcc |
| 48421 | acaaggctat tgtagaggaa acagccccaa ccagaaatgc tgaagaggca gcctcaggca |
| 48481 | gcaaggtttg tgctttatta cctctgaact ttcctcatca ccccatccac agccatgctg |
| 48541 | ctgcaccttc ataggcaagt aatcagagga tgtgaatcca gagaggtacc agcagctgac |
| 48601 | catagggccc ccagcataaa aacaatgtgc cagggKtggg ggttggcaat gtgatctctc |
| 48661 | cctgaactga agaaaacagg aggaagtgRt gaccagcagg agaYggggct gtgagatgct |
| 48721 | ttaggggaaa gcaggcagtg gaataaacga gaaggaaaca gaactatgaa gaaggtgagt |
| 48781 | cattagaaat tatgaggaag aggaagaaac tgacggaagg gaaaaaaaca gtcagtaggt |
| 48841 | ggtaagagSR ggggcgagca ggcatgtggg tgcacttgac atatacaggc gggtcacaca |
| 48901 | ggtaagaacc ccggctccct ccccaggccc aggccccaga ggtgctgtgg atcctgggtt |
| 48961 | tgctcagttc ccatctccgc gaacttggct ttgccatcgt gacttcttga gaagctgcag |
| 49021 | gtcagctttc cagtaagccc attattactg gaagtgactc ggggggagtc gctgggtctt |
| 49081 | tcaagtctgg cagaaacata tgggcacata tcctctgggt catgttgcac aaatgttctc |
| 49141 | aggaccacac atatgacggt attgcccatc tccacgccca aggtccgatc tccagcgggt |
| 49201 | gagcacatgc cctacacggt gctgaccaag ggcaggcaca cacactgttc actgtgctgt |
| 49261 | gtggagctgc tccgcctcca acaggaagct gcagggacat tccctgagca ggagcaagaa |
| 49321 | tgaccttttc cgtcacgtgt accttttctt tccaactaga ctgtagttga tctcaaggtc |
| 49381 | ggagaccacg ttgcacaacc tctttcagat acgtgttcac cagtatttat ttatttattg |
| 49441 | gcattcccta gtatttattt atttattggc atttagtggt gcttgggagt aggggacagg |
| 49501 | aaacaaaata ctcatcactg tgagggaata ttgatttatc caaggagttc attcagcgac |
| 49561 | gcccctgtac tgggttgaat agtgttcccc caaaaactca tgtctatgag accctcaaaa |
| 49621 | tatgatctta ttcggaaaga gggtctttgc agatacaatt ggttaagatg gggttgccct |
| 49681 | gggttaggat gggtccaaat ccaatgactg gtatccttat aaaaaaagaa aacaaagaaa |
| 49741 | tggagacgca cgctgaggga acagccatgc aaaggcagag gcagaaattg gagtggcaca |
| 49801 | gctgtcagcc aaggaactcc aagaattgcc ggcagtcacc agaagctcag acgaggtaag |
| 49861 | gaaggattct tcctgagagc cctcagaggg aacgtgggcc tgctctcacc ttgcctttgg |
| 49921 | acgtctagcc Ktcaaaactg tgagggaata aatttctgtt gttttaagtc acgtactttg |
| 49981 | tggttccttg cgacatcagc cctaggaaac gaatatactt ccaactgttt tccaccagta |
| 50041 | acaaagaagt gtggccatgt cacacggtgt gtggaagaac ctgatggttg tgaactcaga |
| 50101 | gatggaacat agcggctacc tcaaatgagc gagcgataag ttagatggcc tcctctgtac |
| 50161 | aagaagtgat agcaaaatca attagtaaat gctaccactt tcacacctgg gcattctgca |
| 50221 | ggtaagagcc ccgatacaag gatttcaaat gtgactacat tggccaaatg aagagtctgg |
| 50281 | ctgagagagt gaatctaggg aagctggcct cagcaagagc ttcttttggg tgcccgtgtt |
| 50341 | tccattccag gtagtaagag ttaatatgac tgtcacaaac ttactgcaca aagaagcagg |
| 50401 | aaacatctgt ataaatgcgt ccacacagag cctgagtcca gaaatgaaaa gcagaagctg |
| 50461 | tgggagcctg tgattacaat agtcaggggc aaagaggtat cttcctttcc agcttgagca |
| 50521 | ggtccccata taacgtacca ctagggctgt ttattcggca tctgttgggc gccaggcaca |
| 50581 | gtgcttggtg ccttacccat catttaattc tcacttactc ccggcaaccg cctgtaatat |
| 50641 | aggtattgtg ggggggtggg gggggtgggg gggtggggaa tgaagaagat actttgcctg |
| 50701 | ggtcactagg attatttact tagccctatc tctgcagcta acactgtggt aaggaaagag |
| 50761 | gaaactgaaa tagaaataaa atcctggccc tagctcacaa tgaacttaca atacaagtac |
| 50821 | atcctttagt ggtttatata aatttgttcc aaaaaggaag actgtttcat tcaatcttta |
| 50881 | caagtcaact ttggaactta tccctggcaa gtcagaattt aaatgcatct ctaatatgca |
| 50941 | ttggatttga aaaaaaaaaa aacttttgtt ttttttttgc aaatagatag aagtaaatta |
| 51001 | taactcagtg ttccacaaaa caaacttgtt tggaaaagaa ttttaaactt ctgtgattaa |
| 51061 | attagaccca ggactaattg agtacacaga aaaacaagaa aatataaata tcagaaggga |
| 51121 | tttttttcta gttgctttct agttgtttaa ttgtgataat ttaattatca cattcaattt |
| 51181 | ctttccttta taaaaccagg ttaatattaa atttcaagca gagaaactaa gaggttaaac |
| 51241 | tggactcagc catgcatata gctgtaattt attacaggtg atcataaaca cctgtaataa |
| 51301 | aactctacaa aatggagaca aagaatctca gaatcatttg agctgagtta gaggcagttg |
| 51361 | tcagtcaatt ctaatcagaa acagataaag agtggaatag caccctgata gggaatgaac |
| 51421 | aagaaatagt ccaaggtgac agccatgtaa tcttgagtga gttaactctt ctttccatgg |
| 51481 | atcttctttt gaatcagaag gttgaaaatN ccaatatcta ctcctNcata attcaacagg |
| 51541 | attatacaaa actgtcagga gaaattagct gatgtattag atgtaaaagt aagttaagtc |
| 51601 | ttagtagaaa aggtaccaaa aagcatctgg cagaggcaca attctgagga cacatggtca |
| 51661 | aaaaaggtcc tttgcttttt gcgtgtaaaa tctccaaatt ctgtaagctg gttcatccta |
| 51721 | tttgcatgca aactggctgg gaatgaaatt agggcagRat gttatttgct catgttttaa |
| 51781 | ccattctttt ctcacagcct cctcctccta tgttatttac actgtttcct gccctgtgta |
| 51841 | ttgtttccag gacattcatt agattcaggg aaatgaaatt taatagggat gtctaatacg |
| 51901 | taattcaaga tttaaaaagg aacagaaaga tgccctggat tgacctaaca aattgttccc |
| 51961 | ttgactttcc tcagScgaag aaagaagaat tattaccaag aaaatgatcc ttatacacac |
| 52021 | cctaacccta ctctgcagtt tatgcatatc ctcttgaatc atgcatcagt tgtcatcaga |
| 52081 | gacaccttgg agtcccaggg gacagtaaca gcatcatggc tgggatcaca gcaaacccca |
| 52141 | tggggctaag tttctgagat ccaggcccaa gaaataccag cgtgggaagt aaaaataact |
| 52201 | catttttcgg accttaataa ctttcatggt ttgatttatg acaaggaaag aaaagtcatt |
| 52261 | tcctctacca agacctcaat acatggtatg ttcaaaacca aataaaaatg aaaagaaaaa |
| 52321 | aaaagagaag gaaaaagtat aatataatca caagtgacaa aaacgcagaa gagggggtca |
| 52381 | cagagatgtg atgtaagaaa aacttggccg ggcacgatgg ctctcacctg taatcccagc |
| 52441 | actttgggag gcggagatgg gtggatcacg aggtcaggag ttcgagacca gcctgaccaa |
| 52501 | catggagaag ccccgtctct actaaaaata caaaaaaaaa aaaaaattag caaggtgtgg |
| 52561 | tggcaagtgc ctgtagtccc agctactcag gaggctggga caggagaatc gcttgaacct |
| 52621 | ggcgggcaga ggttgcagtg agctgagatc atgccattac actccagcct gggcgacaga |
| 52681 | gcaagactct gtctcaaaaa caaacaaaca aaaagaagaa gaacccaacc tgccattgct |
| 52741 | ggtttgtgct ttattacctc tgctcataga agccatgagc catggagcgt gggtggcctt |
| 52801 | tttaagctgg aaaattccag gagacagatg ctagactcca aaaaggaaag gaaacacctt |
| 52861 | gattttagcc catgagactg tgttgaactt ctgaccttgg aacttcaaaa taataataat |
| 52921 | aatgaatttg tgctgctcta agccaccaag cttatggtaa tttattatga cagtgaaata |
| 52981 | aaacaaacac atctgaataa aaatctagag tacttcaaag taaaaaacaa aacaagtcga |
| 53041 | atattaacta tgctccagtc tcaaagagat catacagtta taggggatgt tttgcctgga |
| 53101 | atgcctggga ccagcctgct ccggattaac actgacgctg gagctcaact ccccagcatt |
| 53161 | ggcctctaac tgcatctctt gggttttctt tagactattt ggattaatgc atgtacacta |
| 53221 | tatacttttg gggcctcttc tgggatctgt gatataaaat tggggcaaga atataggacc |
| 53281 | tgtttccaaa atacttttct tagagaaact ctgaaacaag aagacaaatc ttttactatt |
| 53341 | ttaatagtgc catgagttag aaaataaatt gctcctccag gacttttcct ctgcccatat |
| 53401 | atgttctggc ccttgacttt ctggtttgtc cagacagtgg gtcagtccca cattcagaac |
| 53461 | cctgaggaat aaatYcaaga ttcctgaaga tgccaaggga cagcttggaa tcttgtagtg |
| 53521 | cgggtttact gagcaattta ggcgactgtc ctcagagtcc aattccttta ccatagacga |
| 53581 | tctctctgac tttgccagag catttcctca ctgtgtagta ttgcacctgc cttttgtgtg |
| 53641 | agatgctcta acactactat ggaacatacc ggacattcag tcactgctgc taggtccaca |
| 53701 | gccaactcac aggacttgat caaatcctct atcactgcca aagcttgttg tagttcagtt |
| 53761 | gagaatgctg aatctttggt tctctttggc ccatcctgtg gaaaacaaat gccttgttgg |
| 53821 | aaatcaaaag tataccatct gcaaagtgaa gaaggaaaac aggacagaga tgaggagcca |
| 53881 | gggatccagc caaccctgac tgagaagggt ggatattgat ctgtctccct gctcccaaag |
| 53941 | catggtggct aaagatgctt actgatttag gtatacggca tagagacaag caaaatcatc |
| 54001 | tacctctgtg cattgtacta gtgacgaatg aagttcataa atcatggaaa ttatattcct |
| 54061 | gctacataag aaacatatag aattcagcta tatagctgaa ttctatatgt ttcttatgtg |
| 54121 | tatatatatt atataaatat ttatatagta tattaaatat ttatatatta atatataatt |
| 54181 | atatgtttat atattaatta tatatattaa atatttatat attatatatt atataaaata |
| 54241 | taagtatata tattatatat atatatatat atatatatat attttttttt tttttttttt |
| 54301 | tttttttttt tttttttgag agegagagag agtttcactc tgtcacccag gctggagtgc |
| 54361 | agaggcacga tctcggctcg ctgcaacctc tgcctcctgg attcaagcaa ttctcctgtc |
| 54421 | tcagcctccc gagtagctgg gattacaggt gtgcgccacc atgcctggct aatttttgta |
| 54481 | tttttagtag agacggagtt tcgccatgtt gaccaggctg ttctcaaact cctaacctca |
| 54541 | ggtgatccac ccaccttggc ctcctaaagt gctgggatta caggcgtaag ccactgtgcc |
| 54601 | tggccagaat ttagcttttt taaagcatgg aaaaacctag ctccttttaa ataggcttct |
| 54661 | ctctctttta tacccctatt ccctggggct tactgaaaaa aaaaatacca tatggccggg |
| 54721 | cgggtggctc atgcctgtaa tcccagcact ttgggaggct gagacaggca gagcacttga |
| 54781 | ggtcaggagt ttgagcccag cctggctaac atggtgaaac cccgtctcta ctaaaaatac |
| 54841 | aaaaattagc ttagtgtggt ggtgggcgcc tgtaatccca gctacttggg aggttgaggc |
| 54901 | aggagaacag cttgaaccca ggaggcggag gttgcagtga gcccagattg tgtcattgca |
| 54961 | ctccagcctg ggtaacaaga gtgaaacccc gtctcaaaaa aaaaaaaaaa aaaaaaaaaa |
| 55021 | aaagtagctg ggtgtggtgg tgtgtgcctg taatcccagc tactcaggag gctgaggcag |
| 55081 | gaggattgct tgaacacggg aggtggagtt tgcagtgagc caagattgcg ccactgcact |
| 55141 | ccagcctggg caacaaagtg agaccttgtc tcacaaaaaa agaaaaaaga aaaagaaaaa |
| 55201 | gaatacaatc tgagtatcat attcctatat ttaatgtgga agccttattc ctgtgggaaa |
| 55261 | aattatactt aaaatcatcc cagaggagga catttgtaaa ctcctataga gacaaagaac |
| 55321 | tccatagagg ctgctaagtg gaaatttact aatgatttac atgtaaaagc tataacatca |
| 55381 | tatttccaca ctgaatctcc cccaactctg tccttccttc ctccacttgt ccctggccct |
| 55441 | ccccacattg caccaccatt aaagatgcca aagagataag ccagcgctct gcacctcccg |
| 55501 | aacataaaga ctcagcattc agcRgaaaag cagtaactaa ttaaagagac caatgttcca |
| 55561 | attacaacca cagtgacatt taggatgtga ttggggtgat tgtttcagct ctaaaggctt |
| 55621 | ttgcatgggc ttgaggtatt ttatctccct gctacctaca tgctgtattt atctgttacc |
| 55681 | tggtaaatac acataaaaaa attttggttt attcaatgta tttttttaac atctcaagtt |
| 55741 | ctgcagtgaa gaacagctag cccctttgct gctccgcatc tggccctgac tctttttgtc |
| 55801 | ctctacagca caatgtagtc acagggttta atattttctt aatctatgcg gaagcactgg |
| 55861 | gtatttgcat ctttggatga gagacatgag tgacagggct gatgaatgga atagatcgtg |
| 55921 | ctgctgcctc tgaaaaacgt atcatggatt cgtagcttct cattcataat aaagaagctt |
| 55981 | cgcttcctgg taaaagaaaa cagactctca cctgaattta ttttaacaac atcaataagg |
| 56041 | gattaagagt tcttggcagg gcgcagtggc tcacgcctgt aatcccagca ctttgggagg |
| 56101 | ccgagggggg gagtggatca cgaggtcacg agatcgagac cagcctgacc aacgtggtga |
| 56161 | aaccccatct ctactaaaaa caaaaattag ccgggcgtgg tggcgggtgc ctgtaatccc |
| 56221 | agctactcag gaggctgagg caggataata gcttgaaccc gggaggcgga gttgcagtga |
| 56281 | gccgaaactg cgccattgca ctccagtctg ggtgacagag cgagactctg tctcaaaaaa |
| 56341 | ataaaaaaat aagaaataat ttttttttaa agttcttata ccaggcatct tcctccttac |
| 56401 | caaacactga atgctcagtt tcctttcaga tcctcacctc ttcccatccc ccttccttcc |
| 56461 | gctaaccctc cttcacaaaa cacgaggtgg ctagggtttt gaactgtata atgtagggtt |
| 56521 | cagaaaaatc ctttaaaaca ttattaaact cctctaacta gggctagctc ctcttgctcc |
| 56581 | aggctgtaaa aatatgacct gtgtcctgag ctgcttctgt tttcaacagg tccttgtcat |
| 56641 | ccattctgag cagaaagggc atgcaaatga ctgccccata agacatgtct caagtgtttc |
| 56701 | ttgctaaaac cagaatattc tataggaaag ggaagagaaa ccgcactgct ataMcacaga |
| 56761 | tttcttccta acctggtgtg gtcatggtca ccatttattc taagggaact ttggcagact |
| 56821 | cttagagttc acacacacgc acacacacac acagaggaga acaaggcata acatatagaa |
| 56881 | attagatata ctaagaggta caaagaagaa aacataatcc taccattcag gaaagccaca |
| 56941 | gcagacattt tatcatatct atttacttcc agtcttttat gtatgcattt tacgtatttg |
| 57001 | cttaattttg ttcccattaa aatttttttg gctgggtgca gtggctcacg cctgtaatac |
| 57061 | cagcactttg ggaggccgag gcaggtggat catctgaggt caggagttca agaccagcct |
| 57121 | ggccaacatg gcgaaacccc gtctctacta aaaataaaaa aattagctgt gcatggtggc |
| 57181 | gggcacctgt aatcccagct acttgggagg ctgaggcagg agaatcgctt gaacccggga |
| 57241 | ggcagaggtt gcagtgagcc aagattgcac cattgcactc cagcctgtgc aatggagtga |
| 57301 | gactttgtct aaaaaaaaaa aaattatgtg gaaggaagaa aatatattac cacttccatt |
| 57361 | tgggctgcaa atccctactt taaaattgcc tttaattttt ttgttttttt tcttgactgt |
| 57421 | gagttatagg atacatacta ttttagaaaa tctagataat aaagaccacc aaRtaaaatt |
| 57481 | gctataaatc ctccgaMcca tagacaaaca ccattaatag ttagttatat aaaatgtaat |
| 57541 | atttaatatt gagtacctta gccgagcctc ctagttcacc tgggtctatc tccatatctt |
| 57601 | caggagactc gaRatccagc agaccctgca ttaacccaaa agtcttgttg aaaattaaaa |
| 57661 | tgtacattgc catcaaaatg tagattgtca acaaaatcta ctgtgcaaac tatctgccac |
| 57721 | caatgctaag ctgactgaga acgtgtgtaa atgtgtaaga gggaaagaat aaatgatgta |
| 57781 | tttggcacag ggtcctttcc acaaacctag aatcatattg tacacactat tttgtagact |
| 57841 | actttttctc attcaaccat acctcatgaa tattttccca tgatattatg tttttctaaa |
| 57901 | atatgggctt tgattgtggt agagtgttat atcttacaga taaaccattt ttctcattca |
| 57961 | gcaatatctc atgaatattt tcccatgata ttatgttttt ctaaaatatg ggctttgatt |
| 58021 | gtRgtagagt gttatatctt agagataaac catttttctc attcaacaat atctcatgaa |
| 58081 | tattttccca tgatattata tttttttaaa acatgggctt tggttgtggt agagtgttat |
| 58141 | atcttataga taaaccataa tcgaattata gtccccctta tcattaaaca tttaggttca |
| 58201 | acaatatttt ttactataat aatgataata acttttgtgc atttttctta aagctaaatt |
| 58261 | cctagagtgg aattgtaaat gttaagagtt ttgaggcata tttccaagtt cttcagagaa |
| 58321 | ggactgtctt cctgccagct gtataggaaa gcctgtctca ccagccccta gcctacaagg |
| 58381 | ggtagtacca tttaatcaaa aatctttacc aattgaatga aaagagaaat cctacctcac |
| 58441 | tgttgtttta atttgacttc cttagataac tagaggtgta gaactttttt aaaaaaacgt |
| 58501 | ttgctactag tgtttattct tttgcaaatt gctatgtcct ttgcgcatct ttttattata |
| 58561 | atttccaaga gcacatgatt cattaagcat actgatcatc tgttacatat tttgttcaca |
| 58621 | ttttccccaa tgtttcatga gtctgtcttt aatggtataa gctatcactc atcaccctct |
| 58681 | ccccaagatc ccatgatcct ttctaaagca tgaggcaatc agtccaacat tcatgctctt |
| 58741 | tcaagccagc acatgtgtgc gagatgcaaa ataagctctg cccctgggga tagagaaggt |
| 58801 | cctagatagg attacaaggt Ygttcctttc tttgcaggca cgtaatggcc tgagctggtt |
| 58861 | tcacaggcac cagcaagctt agctgtgggg acactgctct ggtctgcctt gggtagctcc |
| 58921 | cacggctcct cacagacccc ccgcaaaata ttttgtagta attctatctc ttgtttcttc |
| 58981 | agtgaaaggc agctaacaaa accttctaag tccttttaac ctgtattatc tcatttaatg |
| 59041 | ctcccaacaa gcataccagg aaagtactat tattatctta tttctatagg tgagaaatct |
| 59101 | gaggctgaga gaggttaagt aacttgcctg agttcacgca gcctggaagg gtcagagcct |
| 59161 | ggattcagac ccaggttgtt aaactctcga gtctgtgttt ccaatgacga tgccccacag |
| 59221 | ccctctgcgt ctggtaccga acctagctcc tatgtaaatg tcacctctgt gggaaagctg |
| 59281 | gaacctaggc tgagggagga aggaccatca ctttcgtcct gctcatgcct cactgggccc |
| 59341 | agaggttgga cttctacaat aggaatgaca gtgacaatgg gacatgcaga ggagcatgag |
| 59401 | gccctgagtg agtgctgggt caaacatgct ctgaggtgct gctcgctgaa agaagcagat |
| 59461 | cattatcctc atttctatgg tggtgtgaca gtctcaatgt ctaagataac agctacacat |
| 59521 | catgcagagc ttcctgggct gtgccaagcc ctccgcatgt gctaatcatc tgcttcataa |
| 59581 | cgatcttatg gaggaggttc tagtaccctc attttacata gaggaaaact aaggcccaag |
| 59641 | aggKcaaggt ctcataactg acaaatggca gagtacaccg aggctgaaac tgctaatgga |
| 59701 | aagcttgaaa ggagtaactt tgaaaaaatg tttttaaaat tatttttaca gatgaggtct |
| 59761 | tgctatgttg cccaggctag tcttgaactc ctggactgaa gggatgcctc ctgcctccac |
| 59821 | ctcctgagta gctgctggga ctacaggtgt gtgttatcat gtctggcctg aaaggggtaa |
| 59881 | ctttttctga ggggagactg ttgggcaatg agcttaacct tcctgagcct cagtttcttc |
| 59941 | acagtccaga gcatggctgg tatgtctgat tgtggagatt aaataagaaa tactgtaatc |
| 60001 | ccagcacttt gggaggctga ggtgggcaga tcacgaggtc aggagttcaa gaccagcctg |
| 60061 | gccaacatgg tgaaaccccg tctctactaa aaatacaaaa attagccagg catggcggcg |
| 60121 | cgtgcctgta atctcagcta cttgggaggc tgaggcagga gaattgcttg aacctgggag |
| 60181 | gcagaggttg cagtgaactg agatcgcgcc attgcactcc agcctaggca gagtctcact |
| 60241 | ctgtctcaaa aaaaaagaaa gaaagaaaga aaaaagaaat acacgtgggg aagtacccag |
| 60301 | taaacagtag gtgcttgttt ttgtttttgt ttttgttttt tattaagaaa tagtggccac |
| 60361 | tgggcaagag ctacctaaat gccttataga ggttaattca acagacaact tatcgtggtg |
| 60421 | gcccaaacct ttctctcaag ctcacaccta gaaaaccagc catgataggc cctcatatcc |
| 60481 | tgtttggagt gtctgagaat gcttgcctgc agatgtgcta gtgtcaatga cttatcacta |
| 60541 | aggaggggta aaggtcagag agagagagag aaaaccactt aggggttcag ggttcagata |
| 60601 | tagcaaagtt cattctgtta ggctgctctc agggtaagat cctaaatcta agaatggagg |
| 60661 | tcagtgctgc aaaaggatag aagacttcag ttttgtcttc tcccttccac aagttaaaat |
| 60721 | gcccataaaa cagtaacttt ggggaaaatc acactctcgc tcccaaagag ctctcttccc |
| 60781 | ctaagccaga ctccttagtg attcatgccc tgagctagac attggactag tgaggccctc |
| 60841 | aggtgccctc caactctatg attctttggt cttactccac attgaagagg gctgatttag |
| 60901 | agttggagga aagaaaaagc ctgcaggata gacgtatctt cagccttaga agaccaaggc |
| 60961 | acagctctac atgtgtaacg acatgggcac cacagtgcag gcgtctggtt tcccaccaag |
| 61021 | gaaaagcact gtctcattga ttttaccttc aacagcatct ggtattttat aagtctctgg |
| 61081 | cttggtcctt tgagatactt aaaaagaggg agattgtgat ccagttggcg ctggcatacc |
| 61141 | tttaaaagcc aaatagaaac aacataaagc aaaacaaaca acacacacag aataaaagtg |
| 61201 | gcagcattta ggtacaaaac acaaaattgc ttttcctgga caacaggggc agctgtgtcg |
| 61261 | agcagctcca taaggctgtg gggttgttct ttcccctagg aacagtgtgt gaaataagag |
| 61321 | aaagaggaaa gaggacggct cggctaatat ttttacaggc atctagggaa gcagaaccat |
| 61381 | ttatttcttt tagaaagcaa gttcactaga agacagtggg gcatttcaag tccttctgaa |
| 61441 | aaagaggcca cctatcttca agttgggggc tgccagagtc tattcaggcc ttttggagcc |
| 61501 | tgaaggatac agacggtttg tagacatcat tccagggagc ccaaagtgtg acatttttta |
| 61561 | cttagtttca tttttaaaac ccatcttaga agaagacact ggttttctca ccagatatag |
| 61621 | gtgctcctca caggcctatc ccattacaac ttttcatgtg taatttcaaa gtatgggaca |
| 61681 | ctttaaataa acataaatcg caatgccaag ttcctctccc tagtcccact tttgatttct |
| 61741 | ttaacaactt gatgcataga aacattttcc aggaagaagt ttgtcttctc aacattaccc |
| 61801 | caaagtaggc gcagtcttga cactcttgcc agattgccct agctcggggc agattcttat |
| 61861 | ggtatttaaa atatatctga agatcttctt tctaggtggg aaaaaattag aataaattaa |
| 61921 | tcaggcagca tttttcagta agtggacagg atgatacagt ttattcattc attcaacaag |
| 61981 | ccagagtatt ctaatgtgta aggaattggg ggtgtacagt aagtaatctt atgttgggat |
| 62041 | gtgtgtgtga tggagagata aacagaaggc tttaaacaac cataactacc agacatagat |
| 62101 | aggcacagag tgctctggga gcatctacaa gggctattgg taaatacata agtagactca |
| 62161 | caaacaggaa ttggttttta tctttatcat tcttttcctg ccctttgtcc aggacatcga |
| 62221 | catctcccca caacaggtct gcaatgagta gtaaaactga cagaaaagag gctggtgttt |
| 62281 | gatggtcccc ctctcttctc tctccaccct ctccttgtgg tcatcgtgac accaaccctg |
| 62341 | caaagaagcc caagaaacaa ccaaaagatg gaaacatgcc agaggggaga tgtggtagat |
| 62401 | cgggcaacca atacggagct cagtcatttg ggcaaccctc aaagtgacag gctccgcctc |
| 62461 | aaacatcact ttcaacctgc agcacaagac tctgagacag gaaatgttat gtgactgttt |
| 62521 | cggagctaga gagcaaggag gactcaacgt gctgttcaac ctgtattctc atggtatcaa |
| 62581 | agacgctgag aggtgggcac atatctgcca atctcccgga gagaaagcac actccaagcc |
| 62641 | tctggcgtca gcttgccagc ttcactcgct ctatcaggga gcctggccca cagcggctgt |
| 62701 | gctggccaca gatcccatgc cattctggtg gagaagccca tgtagccacc tccttgcaga |
| 62761 | agtctgtgtc cctgtcctcc tgctcagccc aactctggat ttccttcatg tcaacacaga |
| 62821 | tgattccttc cctctcagct tcaatgatgc ctgttctact cccaaataca ttgctatagt |
| 62881 | ggatgacttc catttctgta gctctttctt tctcccaata ggttgtaagt ggtcatttca |
| 62941 | gcataggaac tacagcaacc gtcctttgct attccctcca ggaaaaaaat ggcacacaca |
| 63001 | tttaagacag atggcccttg aaaaatgttc agactggtta aggagctaga ataataactc |
| 63061 | agagcttaac aatatagtat tgacctaaat tgctcttcta aaggctaaca gtccaaaatt |
| 63121 | cctcagagaa aggatgtcca ctaaccagca acatacaaaa gtgcccaatt ctcctaatct |
| 63181 | ccttatagaa tgaatcagga ggctataaaa ttgctaccag aaactcatat tcacacaaga |
| 63241 | atacatactt gcttacggat taagactgcg gggctctggt ggcggatggt ccaggttcag |
| 63301 | ttcttggctt tgccaaatac aaatcatatg gcctaaagta agttacctaa ccttcctaga |
| 63361 | cttcagtttc ctcatctgtt aagtgggccc ataacagtag tcaactcctg tgactgttgt |
| 63421 | gagattaaat gagatgatgt atagaaacct ctccacaaat gcccaatgga tagagtactc |
| 63481 | aaaaaatggt ggctattgtc aaagcacttt ttactttatg gaatcctctg catacattat |
| 63541 | tttgtttccc acaacaactg tacatattgg tactattagc ctgttgtgtg gaggaggaaa |
| 63601 | gtgagattcc aaagtttaag ttatttactg gaggtcatgc agatagcaag tggcttgacc |
| 63661 | aacatgataa atcgggtttc ctgacttacc agttactccc acatatcagt gtgagcaccc |
| 63721 | attccagtgc tctttccatt ttaccatgtg agatctcaga gtacttggaa cccacagtac |
| 63781 | actatggaca aatattattc tatatagaac atggtctctg gaggagaatt gtttcagaag |
| 63841 | atacaggcta aagaggctga ttaaaacact tggtcagaaa actatttcaa aattcattat |
| 63901 | cttggaaggc cgaggtgggc ggatcacgag gtcaggagat ggagaccatc ctggccaaca |
| 63961 | tgatgaaacc tcgtctctac taaaaataca aaaattagcc gggcgtggtg gcacatgcct |
| 64021 | gtaatcccag ctacgaggga gggtgaggca ggagaatcgc ttgaatcagg gagtcagagg |
| 64081 | ttgcagtgag ccgagatcac gccacagcac tccagcctgg tgacagagcg agactccgtc |
| 64141 | tcaagaaaaa aaaaaaaagt actacttgta ttttgtctct aacatcataa atcacatagg |
| 64201 | gctaagtcag tgttttctgg ctgggttaat gatttacaat gttcctccca acatggcggg |
| 64261 | gcgctatcaa aaaactttgt aaaactttac aatttaggag aggaattcag aaaaggtatt |
| 64321 | tagttaataa ttctctgaca atttcctcat atttgaacaa tttgataata tccactttcc |
| 64381 | cacaggaact ttgcccattt ctcattgagc aatttaaata atctttgcag taatgacata |
| 64441 | cataaccata aaatacttct aatctctgaa actagatttc acattagtcg tttgttaagt |
| 64501 | gcaaaaattc aaaatagtat ataaagcact aataatgtaa tagttcaaaa aaattaatga |
| 64561 | atcagaatga gtataaaata gttttcagtg tacattgaat tctggtgctt tgacacaaag |
| 64621 | cctatgatga gttgacatgg aaagccatat ggggccacca aaaggctctg agcatggaag |
| 64681 | attccttctc tccattaatg tcaaatatct tgaaacctgg aggctttgtt tgcttccagt |
| 64741 | tatcataagt attgctctca gcctcagtca taatatgagt tgcttacaac tttaagttgt |
| 64801 | ttgatctgtt gccttgggtt cacaaaaata aaaataagaa agagaatgag aaggactagt |
| 64861 | tgagaaagag aggagaaatg agaactattt agaaggcaca gggggtcagg atcatctcca |
| 64921 | tggtcgtgtc ctagaaagta cctggtgggg attgatgttg ggtggaacat ttctctgtgg |
| 64981 | cagctcccac tggcccatat agcctatttg ttgcctaaaa cagggtggag aaacagggaa |
| 65041 | agagggaaga agtctgggag gtgggaagaa ggggtagttg gaggtataat gttgtaggcc |
| 65101 | aagatgttca taaattgagt actaagccta aaggaggctg tagatttaga attttcgaat |
| 65161 | catcctctat gttgtaaaaa atagaatgga aagaaaatgt atttcctgag gtttttagtt |
| 65221 | taacaccagt gcttctcctc ttgagagcat tagtacagct ttattgtggg actctaacct |
| 65281 | cgctgtatga ttcttgtttt aaaacgtagt tgagtcattc agaagaggat cctctgcttt |
| 65341 | ggggaccatg gatggccagc cttccatttc atggggcttt gcaggaagcc aggcttgcgg |
| 65401 | ttactcccac atatcagtgt gagctcagtc aaattggact cattctcacc ttggataaag |
| 65461 | tcagataaag ttgggaggcc aactcatgtt ttccattcaa agggcagata caagatatac |
| 65521 | tgtcttgaca aattgcaagt gtacagtaca gtattattcc atgatagtcg ccatgctgtg |
| 65581 | cgttacatct ccaggactta ctcatctcat aactgcaagt ttgtaccctg tgaccaacat |
| 65641 | ctccctactt cctctagact ccagcccctg gcaaccaccc ttctacttca atgagctcaa |
| 65701 | ctgtttttgg attatatata tatacatata cacacacaca cacacacaat ggtaatgaat |
| 65761 | gtattcatta acttgattgc agtaatcatt tcacagggtg taagtatatc aaaccatcat |
| 65821 | gttgtatagt ttgaatatat gcaattttta tttaccaatt atacttcagt aaagcttgga |
| 65881 | gtcggaggga agcagatatg tttttagacc attgatgttt ccatttgtcc ttgccactta |
| 65941 | acgcagaaat gtaagggctg actttaacat gattatttac tgggagtaca gacttactct |
| 66001 | cttgagaaag caatgtgcca gaagttcagg gttctcagca cacttttcca actcttttag |
| 66061 | aaaagtccta gaaaaataaa agtatacaag taataatgtt ttgattttga catgtaggta |
| 66121 | attaattttt taagtacaat cacataaggt ttcaagaggt gcctagaaaa atgttctcca |
| 66181 | ggccttcttg ctcttatctt ctacacattg attcagRaaa aaaagctgta ttctgaggta |
| 66241 | ttactacaat taccctgaaa tcactcacaa ctttaagttg ttcgatctgt tgccttaggt |
| 66301 | tcacaaaaag aaaaataaga aagagaatga gaagaactag ttgRgaaaga gaggagaaat |
| 66361 | gagaactact cagaaggcac agggggtcag gatcatctcc aattatcaga acacagctgt |
| 66421 | tcgggtaatt ctaagcacta gtcatagata gactggatac attcactgat gctctctctt |
| 66481 | acatgaaagt aacgttcata agaactgctg ctgctgctgt tgctattact aatatcattg |
| 66541 | acagcttact ataagccagg cataagctaa gtgctccgca aatagtatct catttaatcc |
| 66601 | tcaaccaaag atagggtttt ataaatataa aacctggggc tcaaagaggc tacataactt |
| 66661 | ctctggggaa atcaacagaa atgggtttcc atttcagttt tgcgtctgac caacggacga |
| 66721 | ggaatggggt taggaagcaa ctgtggttca attcaccaag cagcttttct ccctctgtga |
| 66781 | attaggtgtg caatcttggg gtcatcatag cgaataaaga gagttaacaa gttaccattc |
| 66841 | ccatatgtgt aacatgaaag ggtttgaaga tgatttccaa agtcccttat tcctgcaatt |
| 66901 | ctctagaact caatatccaa gcagccccga gttaaaagta caacttgttt gagcagtcag |
| 66961 | cattttctaa caccctagtt cccagcatcc ccttatgata gtagtatgga gatgtgtatc |
| 67021 | ttggtcatct ttgtattccc aatgctgagc acagtgcctg gcacagaaca ggtgctcaaa |
| 67081 | aaatgctgat gcatgaataa ataaacaaag gaacactcaa ctgcatacaa catggatgtc |
| 67141 | tgacactggg tccctgttcc tttgatgtct cttccctttc tctccaggga tcctgtgggg |
| 67201 | cttctcccct cctttcactc caacccaccc caatccaatc cactgactcc aaaccacttg |
| 67261 | cttaaacctg aaaacatcta agtgttttca tctctcaatt ccatcagtct catttccacc |
| 67321 | cttctSttac tctccattct ttctgataac atgaattatt atatacctgt tgtgaaattc |
| 67381 | gtaaagttct ctaatattcc caaagagaaa gtccttgtta ttctgaagaa catctggaat |
| 67441 | tagatgcttt agccaaataa aatccattgg agtgatatat ccctgcagag gtgcaaacaa |
| 67501 | ggtaggtgtt acaaacagga acataccaga gatcatctga attagctact gcaaaaccca |
| 67561 | aaactttagt gaaatgattg aagaatatag cacacttgtt tcttgaaagc tatcgtattg |
| 67621 | agtactttct tttgatatca ttttcctcat gtgcccactt tcagaaggag atggcttaat |
| 67681 | ggcaatgatc ataaaatggc atttttgtgg gaagaacaaa tatatttaaa aatgtttatg |
| 67741 | ttacacaggt ttaatctaaa agaagggaaa atgtacccac tgttttatga actaatacaa |
| 67801 | ttactattat tattatgatt attattaata ttgagacgaa gttttgctct tcttcccagg |
| 67861 | ctggagtgca atggcgtgat ctcggctcac tgcaacctcc gcctcctggg ttcaagtgat |
| 67921 | tcttccgttt cagactccca agtagctgga attacaggca cacaccacca cacctggcta |
| 67981 | attttcgtat ttttagtaga gacagggttt caccatgttg gccaggctgg tctcaaactt |
| 68041 | ctgacctcag gcgatccacc cgcctcggcc tcccaaaatg ctgggattac aggcgtgagc |
| 68101 | cactgcatcc ggcccaataa ttatttttta atatctgaat aatgtttact cagcatatat |
| 68161 | atcatagttt actaaacatt ccctttttat ggacatttgg gttgcttcta atattttatg |
| 68221 | gtaaaaatgt gattataaat aatcgcgtac atataatttt ttccttaaga ttattccctt |
| 68281 | aggaaaatag ggaaaacatg catttttact cttaagaaaa agactacttt aaaaaaacaa |
| 68341 | gaaataatct tcccttatta aagtatcagg aacacttata atatcctttg ttggcaagaa |
| 68401 | gatggtaaac ctatttgggc tttgctggaa tcagtgtgaa ctggcttaat tctttggaaa |
| 68461 | ctatttggct acatggatca agaaaccaca gggatgttct tattcctact ggagacactt |
| 68521 | gtaatattct aagacctgaa accttggtgg gaattctgga gacttctggc aactattttg |
| 68581 | agtctctttg tacaacaaaa catctgcagt ttgaatatat gcttgatacc ccactcccca |
| 68641 | aatctactta catcaattat gcttttaatc tcttttatgt aaatctcttc agtctcaagc |
| 68701 | aagtcacgta taatgcgcct gaatcacagc agcaggtggg agggtgaaag agagagagac |
| 68761 | agggagagga gaatgttctt ttagaattct gttagaataa tgctcatcaa tacagttccc |
| 68821 | ttttagtggc tcacctactt agtttctggt cagttcattc tgttctattg aacacccaag |
| 68881 | gtcagcatct cacaaacgca cactgtgatc acactggtat caagaagaaa cagcaaggtt |
| 68941 | agagaactca aaatccttta ggcagccagt gaatgacctg tcctctgggt gggccatata |
| 69001 | gtgtgggggt caagaaggga gatgttggag tcagaaatac caggtctgga tccttagtca |
| 69061 | aggaaggtct gcctgacccc acccccaccc cctatattgt atacattgta taagtggttt |
| 69121 | cctagatttt ctctccagct ttctgctcac atcaagcttt cttttccttt taagagaaag |
| 69181 | ggtcttgccc tgttgcccag gaatgagtgc agtggcatga tcatggctca ctgtagcctt |
| 69241 | gaactcccgg gctccagcaa ccctcctgcc tcagcctccc aagtagctag ggctacagat |
| 69301 | atgcaccatc acacccagct aacgcctttt tttttttttg gtagagatga ggtcttgcta |
| 69361 | tgttacccag gctggtctca aactgctact ttcaagcaat cctcctgcct ttgcctccca |
| 69421 | aactgctggg attataggtg tgagacactg tgccaggcca gatccagatc tttgacccat |
| 69481 | atggatgtat tttgttgtac atggggttag atgtatgcta gctccttcct ctggcattgg |
| 69541 | atgtttcact gtgatttcct aaggcaaaag atatgacttc tgtctgcttc tgtcaaggaa |
| 69601 | tgcaggtgga agatgtggtg gacagaattt aagacggtcc ccaagacttc tggccccact |
| 69661 | gcacatacgc ctcttccaat caaacactaa tttaggggat gctgtggaag gattttgctg |
| 69721 | ttcatttgat aggtaatcca gttgggcctg tcctaatcat atgaactcag atctatMtgg |
| 69781 | gtcaagtggt cagagactgg aagcataaaa aagattcaac acaaaggaga ttcccctttg |
| 69841 | ctgacttttg agatggaggg ggccagatgg aatggaatgt gggcagccgt aggaactgag |
| 69901 | agtggctccc agctgacagg cagcaaggaa gggaaatcag tcctatagtt gcaaggaacc |
| 69961 | gagtcctgcc acaaccacgc gaacttagaa gaggatccag agctccacat gaaaacacag |
| 70021 | ccagccaaca ccttgacttt agccttgtgg gactcctgtc ccagggaaac tgtaggtctc |
| 70081 | ctaagtttgt ggtcagtttt tatatagcaa tagaaaacca gtagaaagag taaggccagt |
| 70141 | ccccacatct atcccagaca gactttcttt ctctcctcag gctacgtggc catatttatt |
| 70201 | atttctttta ggagtccaag tagatgagtg tttatacatg tgtccttgtg tagaatatat |
| 70261 | atatttattc ttgttaacta ttgatggatt atctattaaa tggcagcctc tcctagaaaa |
| 70321 | tgatttgttt ttctctcata aaaatggatg tgacaaatga tccaatagaa aaaaatggga |
| 70381 | aaggacacaa aataggagat tcacacaaat attcaaatgg atatgagact cgtggaaaaa |
| 70441 | atactcagta catacattca acgaaggcat attttaaaag agcaacaatt ttcatctatt |
| 70501 | agaatattaa acatttcaaa cctcatagaa agactggtaa atgagggtgt ggaaaaaccc |
| 70561 | tcacacaata ttggtaaaat gtgtaaattt gtgcaagctc tttggaaggt aatttagaaa |
| 70621 | catctcaccc aaatgtaaaa cacgtgctcc ttggttcagt aatttcactt ctaggaatgt |
| 70681 | tcattgttta taattaggac aatataactt caacaacaac cagatataaa ctggttactt |
| 70741 | aaatgctcat caaaaaatta tggtacatgg gccgggcatg gtggttcacc cctgtaatcc |
| 70801 | cagcactctg ggaggctgag gcaggtggat cacttgaggc caggaaatcg agacCagcct |
| 70861 | ggccaacatg gtgaaaccct gtgtctacta aaaatacaaa aaattagatg ggtgtggtag |
| 70921 | cgcatgcttg taatcccagc tacttgggag ggtgacgcag gataattact cgaacccagg |
| 70981 | aggtggagat tgcagtgagc cgagatcaca ccattgcact ccagcctggg caacaagagt |
| 71041 | gaaactccat ctcaaaaaaa aaatatatat atacatacat atagatatag atagatatat |
| 71101 | gtgtgtgtgt gtgtatatat atatacatat atatggtaca tacatataat gatgaaatac |
| 71161 | catgcaattg ttaaaaagaa tgaggctgac taaaacactg atatgacaga ggccaggtat |
| 71221 | ttttagtgaa aaaacaaaac aagacgtaga caagtaagca tagtatgact atttgtgtaa |
| 71281 | aaaatgaatg tgtatgtaga aatatacgta aaactgtata tgctcagaaa atttatgcaa |
| 71341 | agaaacttaa cacattgtta aaagtgattg cttttggaga gtggtactga aagctaaagt |
| 71401 | atgggaaagg agaatttcta catcttactc tatacccttc tacaatcttt tttaaagtga |
| 71461 | aacatttact gcttttataa tggaaaaata gggtttacat aatattttaa aatgaatgtt |
| 71521 | actggaggta atgatatgta aaccctattt gatagatata aataaataat acaattcaca |
| 71581 | tattttacag ctcattattc tttcttataa tcatttttgt gtctatttat aaatacttgt |
| 71641 | ataagacaag actgataaac aagatgtacc acagaggatg taatttccgg aagtctaaaa |
| 71701 | ctcccaaaaa gttacttaaa catcatactt tactaagtca ctgagaaaga ggttcctatg |
| 71761 | ccttttataa atcacccgga aacaacaacg gtttctatgt cagaaggaag tacaggcctc |
| 71821 | aataccaata tgtttctacg agccctggca tcaagtggga ccacagcaac agttaagcat |
| 71881 | tcatggaaaa cctgagtaca atcagcctct tatgccttca tgaagcactg ggcttaagca |
| 71941 | acttggcaag ctggcttcag gatgcattga caattaaagg aagtcagaag gcagaaataa |
| 72001 | ccaggaggtg gacagaagtc aaggttatta tccaaaaatg atctatgaac ttaagagact |
| 72061 | cttaggagct tttaggactc taatacagga aaatattcac atctctgaag gaaaagaaat |
| 72121 | cccttggtca tattctggat tacagtttgg aaaaaaagtc tagaaatctc atccaactgc |
| 72181 | ttcattttac ctgttggagt gcaagagata aaatgccaag gataggaact ccactgaaga |
| 72241 | atgtaggcaa atcaatattc attaaataca ttcaaattaa tatatgactt aaaaagagcc |
| 72301 | ctcacatcag tgttaggcca ttgcttttcc ttgcttctct tgttttcctt tcaaatacct |
| 72361 | ttataaaata ggagaaaatg tatgactctt tttttttttt tttttttttt attatactct |
| 72421 | aagttttagg gtacatgtgc acattgtgca ggttagttac atatgtatac atgtgccatg |
| 72481 | ctggtgcgct gcacccacta atgtgtcatc tagcattagg tatatctccc aatgctatcc |
| 72541 | ctcccctctc ccccgacccc accacagtcc ccagagtgtg atattcccct tcctgtgtcc |
| 72601 | atgtgatctc attgttcaat tcccacctat gagtgagaat atgcggtgtt tggttttttg |
| 72661 | ttcttgcgat agtttactga gaatgatggt ttccaatttc atccatgtcc ctacaaagga |
| 72721 | tatgaactca tcatttttta tggctgcata gtattccatg gtgtatatgt gccacatttt |
| 72781 | cttaatccag tctatcattg ttggacattt gggttggttc caagtctttg ctattgtgaa |
| 72841 | tagtgccaca ataaacatac gtgtgcatgt gtctttatag cagcatgatt tataatcctt |
| 72901 | tgggtatata cccagtaatg ggatggctgg gtcaaatggt atttctagtt ctagatccct |
| 72961 | gaggaatcgc cacactgact tccacaatgg ttgaactagt ttacagtccc accaacagtg |
| 73021 | taaaagtgtt cctatttctc cgcatcctct ccagcacctg ttgtttcctg actttttaat |
| 73081 | gattgccatt ctaactggtg tgagatgata tctcataatg gttttgattt gcatttctct |
| 73141 | gatggccagt gatgatgagc atttcttcat gtgttttttg gctgcataaa tgtcttcttt |
| 73201 | tgagaagtgt ctgttcatgt ccttcgccca ctttttgatg gggttgtttg tttttttctt |
| 73261 | gtaaatttgt ttgagttcat tgtagattct ggatattagc cctttgtcag atgagtaggt |
| 73321 | tgcgaaaatt ttctcccatg ttgtaagttg cctgttcact ctgatggtag tttcttctgc |
| 73381 | tgtgcagaag ctctttagtt taattagatc ccatttgtca attttgtctt ttgttgccat |
| 73441 | tgcttttggt gttttggaca tgaagtcctt gcccacgcct atgtcctgaa tggtaatgcc |
| 73501 | taggttttct tctagggttt ttatggtttt aggtttaacg tttaaatctt taatccatct |
| 73561 | tgaattgatt tttgtataag gtgtaaggaa gggatccagt ttcagctttc tacatatggc |
| 73621 | tagccagttt tcccagcacc atttattaaa tagggaatcc tttccccatt gcttgttttt |
| 73681 | ctcaggtttg tcaaagatca gatagttgta gatatgcggc attatttctg agggctctgt |
| 73741 | tctgttccat tgatctatat ctctgttttg gtaccagtac catgctgttt tggttactgt |
| 73801 | agccttgtag tatagtttga agtcaggtag tgtgatgcct ccagctttgt tcttttggct |
| 73861 | taggattgac ttggcgatgc gggctctttt ttggttccat atgaacttta aagtagtttt |
| 73921 | ttccaattct gtgaagaaag tcattggtag cttgatgggg atggcattga atctgtaaat |
| 73981 | taccttgggc agtatggcca ttttcacgat attgattctt cctacccatg agcatggaat |
| 74041 | gttcttccat ttgtttgtgt cctcttttat ttccttgagc agtggtttgt agttctcctt |
| 74101 | gaagaggtcc ttcacatccc ttgtaagttg gattcctagg tattttattc tctttgaagc |
| 74161 | aattgtgaat gggagttcac ccatgatttg gctctctgtt tgtctgttgt tggtgtataa |
| 74221 | gaatgcttgt gatttttgta cattgatttt gtatcctgag actttgctga agttgcttat |
| 74281 | cagcttaagg agattttggg ctgagacgat ggggttttct agataaacaa tcatgtcgtc |
| 74341 | tgcaaacagg gacaatttga cttcctcttt tcctaattga atacctttta tttccttctc |
| 74401 | ctgcctgatt gccctggcca gaacttccaa cactatgttg aataggagcg gtgagagagg |
| 74461 | gcatccctgt cttgtgccag ttttcaaagg gaatgcttcc agtttttgcc cattcagtat |
| 74521 | gatattggct gtgggtttgt catagatagc tcttattatt ttgaaatacg tcccatcaat |
| 74581 | acctaattta ttgagagttt ttagcatgaa gggttgttga attttgtcaa aggctttttc |
| 74641 | tgcatctatt gagataatca tgtggttttt gtctttggct ctgtttatat gctggattac |
| 74701 | atttattgat ttgcgtatat tgaaccagcc ttgcatccca gggatgaagc ccacttgatc |
| 74761 | atggtggata agctttttga tgtgctgctg gattcggttt gccagtattt tattgaggat |
| 74821 | ttttgcatca atgttcatca aggatattgg tctaaaattc tcttttttgg ttgtgtctct |
| 74881 | gcccggcttt ggtatcagaa tgatgctggc ctcataaaat gagttaggga ggattccctc |
| 74941 | tttttctatt gattggaata gtttcagaag gaatggtacc agttcctcct tgtacctctg |
| 75001 | gtagaattcg gctgtgaatc catctggtcc tggactcttt ttggttggta aactattgat |
| 75061 | tattgccaca atttcagagc ctgttattgg tctattcaga gattcaactt cttcctggtt |
| 75121 | tagtcttggg agagtgtatg tgtcgaggaa tgtatccatt tcttctagat tttctagttt |
| 75181 | atttgcgtag aggtgtttgt agtattctct gatggtagtt tgtatttctg tgggatcggt |
| 75241 | ggtgatatcc cctttatcat tttttattgt gtctatttga ttcttctctc tttttttctt |
| 75301 | tattagtctt gctagcggtc tatcaatttt gttgatcctt tcgaaaaacc agctcctgga |
| 75361 | ttcattgatt ttttgaaggg ttttttgtgt ctctatttcc ttcagttctg ctctgatttt |
| 75421 | agttatttct tgccttctgc tagcttttga atgtgtttgc tcttgctttt ctagttcttt |
| 75481 | taattgtgat gttagggtgt caattttgga tctttcctgc tttctcttgt aggcatttag |
| 75541 | tgctataaat ttccctctac acactgcttt gaatgcgtcc cagagattct ggtatgtggt |
| 75601 | gtctttgttc tcgttggttt caaagaacat ctttatttct gccttcattt cgttatgtac |
| 75661 | ccagtagtca ttcaggagca ggttgttcag tttccatgta gttgagcggc tttgagtgag |
| 75721 | attcttaatc ctgagttcta gtttgattgc actgtggtct gagagatagt ttgttataat |
| 75781 | ttctgttctt ttacatttgc tgaggagagc tttacttcca actatgtggt caattttgga |
| 75841 | attccctgct ttattattct aaagcaagct tgtccaacct gcggcctgtg gcccaacaca |
| 75901 | aatttgtaaa ctttcttaaa acgttatgag attttttttg cgattttttt tttttttttt |
| 75961 | tttagctcac cagctatcgt tagtgttaat gtattttttg ttttgttttg ttttgagacg |
| 76021 | gagtcttgct ttgttgccag gctggaatgc agtggtgcag tctcggctca ctgccacctc |
| 76081 | tgcctcccag gttcaagcaa ttcccctgcc tcagactccc gagtagctgg gactgcaggc |
| 76141 | gtgcgccacc atgcccagct aactttttgt atttttgtag agatggggtt ttaccatgtt |
| 76201 | ggccaggatg gtcttgatct cctgacctcg tgatccaccc tccttggtct cccaaagtgc |
| 76261 | tgggattaca ggcgtgagcc acctcgcctg gccagtgtta atgtatttta tgtgtggccc |
| 76321 | aagacaattc ttcttcttcc agcgtggccc aggaaagcca aaagattgga cacccctgtt |
| 76381 | ccaaagcatg taattttatt cacagaaaag actctcggcc gggcgcggtg gctcacgcct |
| 76441 | gtaatcccag cactttggga ggccgaggca ggcggatcac gaggtcagga gatgtagacc |
| 76501 | atcctggcta acacggtgaa accccgtctc tactaaaaat acaaaaaatt agccaggcgt |
| 76561 | ggtggtgggt gcctgtagtc ccagctactc gggaggctga gacaggagaa tggcgtggac |
| 76621 | cccggaggtg gagcttgcag cgagccgaga tcacaccact gcactccagt ctgggcaaca |
| 76681 | gagcgatatc cgtctcaaaa aaaaaaaaaa aaaaaaaaag actctcaagg atttaccatc |
| 76741 | taaaatcatc aagtgtatat catgcagatg aacaacagaa aacactggga gtattcaagt |
| 76801 | aattaaaaat aacctttcag caccaacagc aatttctgtc ctgatggcaa tctactcaga |
| 76861 | gctagaggac tgcacttagg ataccaaagg gagcttagga tgcaagagca gcctgcacta |
| 76921 | atgtactctg cgttagttta catccgggca ctttgcttta cgtttcaaaa cagacgccgc |
| 76981 | ccttagctca ttaaagggga aatggaggta taatgtgttt taaagggatg tttcttctct |
| 77041 | gaagccatat ttcagggtag catgaaaaca gagctttgga tatctggttc cattctacat |
| 77101 | gacacctcat gcttgtttca aatgacacca caaccaaggg gcaggaatga aaggaatatg |
| 77161 | ctaaaaaaaa aaaatgcaat cctttttagc aagaaagatc attaaggatt tcctgataag |
| 77221 | tttcttcttt gttcatgtgc cctcctctgc tccccctttg aactactgcc cctgtcaccc |
| 77281 | ccccttcccc gcctccccgc cgtttctcag ttctccaata gggatccagt ctgccagagg |
| 77341 | tctatttttg ctcattattg tcaacacaat ttgccatcaa gagttttcac ttactcctgc |
| 77401 | tatcctatca tcacattatg catgtcagaa agcattacag atttttactt ttcaagaacc |
| 77461 | cgaactcaga tttccaggct tctgtccttc ctgtttcatg ctgttgactc tcccacatct |
| 77521 | ttgtcttcct cctagacctt tggtcactct tgagcccaca ttgccaatgg tctatatcat |
| 77581 | tttcacctgg atgcctccca gacacctcag tcacatcaag ttgaaataga actaattaga |
| 77641 | cagaagtagc atgtgtttca gtggaactga catttttcta gggtccctaa aacacaggtg |
| 77701 | ttgtttcaaa ctcccccctc caacatccct tatattctct ctgtcaccca ggctccttat |
| 77761 | atcatctctc aacatgcttc ctgggtgact actgactctc cacttctggt gacaccccac |
| 77821 | agagcaagct ttcaattcct gtcatttaaa cactttagtg cactcataga atctcatcct |
| 77881 | tctgagattt ctcttccacc agtctatttt gcagaccacc aggctacgcc cttccaaaag |
| 77941 | ctcctttgag atggagtttc actcttgttg cccaggctgg agtgcaatgg catgatctcg |
| 78001 | gctcattgca actgccacct ctcaggttca aatggttctc gtgcctcagc ctccccagta |
| 78061 | gctggggtta aagttgcctg ccaccatacc cagctaaatt ttgtattagg ggttttacca |
| 78121 | tgttggccag gctggtctcg aactcctgac ctcaggtgat ctgccaccta ggcctcccaa |
| 78181 | agtgctggga ttacaggtgt gagaaaccac gcctagtccc ccaaagctcc atttttatcc |
| 78241 | tgtcttcatt ctctcttcaa gaacttgcdc acagctgcca gagttccttc taagagttta |
| 78301 | agactctctg ttcatgtggt aagaatcttc ttaaggagct tgctttaaag gtaaaaccag |
| 78361 | atttacacat cagaatgggg agaggtgggt gggagctaag atggaatctg taattttcac |
| 78421 | aagtgccctg gatgattcta ctgcagatgg tctcctattc aactaaatag cactcatctg |
| 78481 | acccactcct tttagacccc acttctgtta agccagtgtt atcgctattt tccactttct |
| 78541 | ttcaagttct aatcatcctt aaaactccaa cagcttcagc tgaaatcagt accacactct |
| 78601 | catccttgtt tcccacccaa aaactattgt actaattgac cagacatgta ttgatgccct |
| 78661 | actatgagcc tggctccatg ataggcactt gggatagaga aatgtaccat aatcctgacc |
| 78721 | ttaataaatt tagagtctaa tggaagagat aaaaaaaatc aatgattcca atgagtgtga |
| 78781 | taaggtaagg ctagtcagaa aagtcaggtg cagaggaggg gcaactaatt aaaccagggg |
| 78841 | ttgggggaga cactgccaac tctgtgttga gtgaagttta agcagaggtt tttctttaag |
| 78901 | taaaaaatca gtttttttaa ataaaaagtt ttttaaaaag taagggggaa tagaagaagg |
| 78961 | aggtttgtcc ctaaggggaa cagtgtggag gaggaaagga ggtgaaagtg tatgctattc |
| 79021 | tgtgtactgg caaattcttt ggtgggtgat atggtttggc tctgtgtccc cacccaaatc |
| 79081 | tcaccttgaa ttgtaataat ccccacatgt catgggaggg acccagtgga aagtaattga |
| 79141 | atcatgaggg caggtttttc ctgtgctgtt ctcatgatag tgaataagtc tcaggagatc |
| 79201 | tgatgatttt ataaagggcg gttcccttgc acatgctctc ttgcctgcca ccatgtaaga |
| 79261 | catgcttttg ctcctccttt gccttccacc atgattttga ggcctcccca gctatgtgga |
| 79321 | actgtgagtc cattaaacct ctttccttta taaattaccc agtctcagct atgtctttat |
| 79381 | taggagcatg agaatagact aatacagtaa attggtactg gtagagtggg gtgctgcagt |
| 79441 | atctgaaaat gtggaagcaa ctttggaact gggtaacagg cagaggttga aacagtttgg |
| 79501 | agggctcaga agacaggaag atgtggtaaa gtttggaact tcctagagac ttgttgaatg |
| 79561 | gctttgacca aaatgctgat agtgatatgg gcaataaagt ccaggctgag gtggtctcag |
| 79621 | atagagatga ggaacttgtt gggaattgga gcaaaggaga ctcttgctat gttttagcaa |
| 79681 | agagcctggc agcattttgc ccctgcccta gagatctgtg gaaatttgaa cttgagagag |
| 79741 | atgattcagg gcacctggca gaagacactt ctaagcagca aagcattcaa gatgtcactt |
| 79801 | gagtgctgtt aaaagcattc agttttatgt attcacaaag atatggttcg gaattggaac |
| 79861 | ttatgctcaa aagggaagaa gagcataaaa gttcagaaaa ttggcagcct gatgatgtga |
| 79921 | tagaaaagaa aaacccattt tctgaggaga aattcaagcc tgctgcagac atttgcataa |
| 79981 | gtaagatgga gccaaatgtt aatcaccaag acaaagggga aaatgtctgc agggcatgtc |
| 80041 | aaggaccttt gtggcaaccc ctcccatcac aggctcaggc ctaggaggaa aaagtggttt |
| 80101 | tgtgggccca gcccggggac ccctgctcta tgcagtctag ggacttgttg ccctgcatgc |
| 80161 | cagttgctcc agccatggct gaaaggggcc aaggtacagc tcaggccatt ggttcagaga |
| 80221 | tgcaagcctc aagccttggt ggcttacacg tagtgttggg cctgtgggtt cacagaagtc |
| 80281 | aagaattgag gtggatgtac agaaatgcct ggatgtccag gcagaagttt gctgcagggg |
| 80341 | tggggccctc atggagaatc tctgctaggg gagtatggaa gggaaatgtg gggctggagt |
| 80401 | ccccacacag agtgcccact gggacactgc ttggtggagc tgtgagaaga gggacaccat |
| 80461 | cctccagact ccagaatggt ggatccacca acagtttgca ccatgtgctt ggaaaagctg |
| 80521 | cagataccca acaccagccc atcaaagcaa ccacaagggg ggctgtaccc tgcaaagcca |
| 80581 | caggggcaga gttgcccaag gctgtggtgg gaacccacct cttgaatctc tatgagacat |
| 80641 | ggagtcaaag gagattatit tggaacttta aggtttgact gctttattgg atttcagact |
| 80701 | cgcataaggc tgatagcccc tttgttttgg acaatttctc ccattttgaa caggtatttt |
| 80761 | tacccaatgt ctacacccac attttatctg ggaaatagct aacttgcttt tgattttaca |
| 80821 | ggcacatagg tggaagggac ttgccttgtt tcagatgaga ctttgaactg tggacttttg |
| 80881 | agttaatgct gaaataagtc tttgggggac tgttgggaag gcatgatttg tcttgaaatg |
| 80941 | tgaggacatg agatttggga ggggccgggg tgaaatgata tggtttgtct ctgtgtcccc |
| 81001 | agcttcatca ggatcctccc acacatcccc attctaagtt gcagggtccc attcttttcc |
| 81061 | aatcaatgcc ctcattttaa cagtagacac ctggtgaggc tgtgcatgca cctttcattg |
| 81121 | caggtcagcc gctcccatga taagagcttg tatctgattt tccacaattt cagctctttc |
| 81181 | tctacaagag ataagactct cactctggac aatcttagaa gatttgaggc tcagtgtatg |
| 81241 | cttctggagc tgggagttag aatccctaag ttcatggttt tcttctatca gtttgtccag |
| 81301 | tgaacttagg agcaaccaac caacttcgtt atattccttg gtcctctata tatggtcaaa |
| 81361 | ggtattatgt atagagtcat taaactcctt gcctctcatg agtggtgaat caggagtact |
| 81421 | gaatgcattt cttttgcata agtgtttgaa cagttcgtgc caaggactat cagtgttctc |
| 81481 | cacacaatta gaagtagagt ccttagcatt ttggggtcta atcatattaa gcaaccaact |
| 81541 | ccagaaaccc aaaaaccaac taaagaaatc tatccttctg taatcccagc actttgggag |
| 81601 | gccaaggcag gcggatcacg aggtcaggag actgagacca cagtgaaacc ccatctctgc |
| 81661 | taaaaataca aaaaattagc caggcatggt ggcgggcacc tgtagtccca gctactcggg |
| 81721 | aggctgaggc aggagaatgg catgaatcca ggaggcggag cttgcagtga gctgagattg |
| 81781 | cgccactgca ctccagcccg ggtgacagag tgagactcca gctcaaaaac aaaaaaaaag |
| 81841 | aaaaaaaaga aatccatcct taaaattctg ttcctctaga accattccca gtaccaaaat |
| 81901 | ctgattaaaa aaaaaaaaca ggcagaggaa ggtggaagga ctagatcttt ctccagtgct |
| 81961 | ggatgcttcc tgccctggaa catcagactc caagttcttc agcttttgga ctcttggact |
| 82021 | tacaacagta atttgccagg ggctctttgg cacttggcca cagactgcag gctgcactat |
| 82081 | cagcttccct atttttgagg ttttgggact cagactggct tcctgactcc tcagcttgca |
| 82141 | gatgcctatt gtgggacttg gtatcttgtg attgtgtgag tcaactctcc taataaactc |
| 82201 | cccttcatat attcatctat cctattagtt ctgtaccttt agagaacact gactaatgcc |
| 82261 | gtggggttaa gccaatcgtc tagtaggttc ataaaatgct aaaagcagat ataaacttaa |
| 82321 | agacgatcca gctcatctct tcattttaca gatgtaaaaa cagaagtaga aatagaattg |
| 82381 | gaaccccagt ttcttgaaac ccagtgtttg cataatacca tgctaatttc attctaattt |
| 82441 | gtgttttatt taataatcag gaaacagttc aaatagaggc ccagggctct gaaacattgc |
| 82501 | ccaaggtcta tggcttttgc aaagcaagta ctgtttctgc tactttacct agttgctctt |
| 82561 | ggcctatgtt tggggtgcat ctaaagaact gtttgctgat tattaaataa aacacaaatt |
| 82621 | agaatgaaat tagcatggtg ttataaaaac acagggtttc aagaaactgg ggttccagtt |
| 82681 | ctatttctac ctctaggata cagggtaagt cacttccttt ctcagattct gtttctttgt |
| 82741 | atgtcaaagg gctggattag ataaacttga cttcccctct tggccctcat gtatcattct |
| 82801 | ataaatatgt tatcatttct aatagactgt ttgatgtaat cttttgtcta atggcccctg |
| 82861 | cttttcacaa taaatgaaac aaaggtcaca agacttttat tcatttgcaa ccctgattaa |
| 82921 | ctaacagtta atgtgtaact ggagtgccac atagaaacag aaaggagaag gggaatggat |
| 82981 | tgggttggag aaggtgaagt ctgacctatc ctctacaaga ggtacagggt ttatccagga |
| 83041 | agacaggagt gccatgagga gtaaactcca gcaggggctg gagtcatggc cacacacagg |
| 83101 | gccttacagg atccaggctg cccagagcag agtttggatg ggggctggga ggctggggga |
| 83161 | gctagctgag gagatggttg tcatgccagg ccacgagtgt ggatgagtgc tggccagggg |
| 83221 | aggtatagga gattgatggg gctgtggcaa gcagggcaga tacccttcca ggaacctgtt |
| 83281 | tcattaaaca cagaatacag tcctgagggc tcggtctcaa tacagtcctg agggctcggt |
| 83341 | ctcaggaaaa catgttctta agttttacat ccttcttctg ttttgattag gtgtttcctg |
| 83401 | attataaaat aaattcctag aactgttaat ggtaacaaca caaagcacta tagacccata |
| 83461 | cgaggatcat attgaaacca atgacattta agaataaaag atctgatgaa tatgaacact |
| 83521 | tccctggttc ctaggaggat aacagttgag ttttgctcag gtaatctgcc ttctcttcct |
| 83581 | tcttctctgc tttRtatctc agtttctata ttttgtctta cattaatagg atttgttctc |
| 83641 | attaccctga tgattttatg gtaaactacc tcaaattctt tttggaagaa gatgggatat |
| 83701 | aaattatttt taaagtttat ctgaatagat gttcttcaat atcacacaat aaataatgac |
| 83761 | aatgtaactt tgtgcatata gcactttaag agattgatca taaacacaat cctattaatc |
| 83821 | ttaattcaag ttaataatgc ttgcatttgt atggcatttt aggtattata aagttttttt |
| 83881 | taattgtggt aagatatgca taaaatttac tatttaaacc tttttgaagt gtatagttca |
| 83941 | gtagtgttaa gtacattcac aatgttgtgt aaccatcacc actagccatt tccagacttt |
| 84001 | ttcatcatcc caaactgaat ctctgtacct attaaacatg acctcattct ccacctcccc |
| 84061 | acagctcctg ggaacctcta ttctactttc tgtatgaatt ttcctattct aggtgtctca |
| 84121 | tataagtgga atcatacaat attcatcctt tggtgtctgg cttatttcac gtagcgtaat |
| 84181 | gctttcaagg ttcattcatg ttgtagcatt tatcagaatt tgattcattt ttaaggctga |
| 84241 | atatcttcca ttttatgtgt ctaccacatt ttgcttatcc attcttctgt tgatgaacac |
| 84301 | ctgggttgtt ttcacctttt ggctattgtg aataatgctg ctatgaacac tgatgtgcaa |
| 84361 | gtacctgtct gagtctctgc tttcaatttt gggcatatac ctagaagtgg gattgctgga |
| 84421 | tcataggatc attctatttt taactttttt gaggaattgc cataccaccc gctacagcag |
| 84481 | ccgcatcttt tatattgcca acagtgcaca aaggctctga tttctccact ttctggtcaa |
| 84541 | catttagatt atcattcttt ttttaaaaaa acgtaataSc taacccaatg ggcatgaagt |
| 84601 | aaggttgttt ttgttttttg tttttaatgt gtgcgttatc ttacttgatc cattaaatcc |
| 84661 | ctaacaagaa ctcctctagg gcagatgtcc tgtcttattc atccttggcc ccagtgtctt |
| 84721 | gcaagcaagt gaattctcaa taagtgttaa ttgaatggat ggttgataga tttataggat |
| 84781 | gcatgccaat tctgtggacg agagtaggta ctaattgtta ttttcatttc acagaagagc |
| 84841 | aagtcagggc tccgagcact aagtgacttg gctgaggtca aactgcctgc aagttttatc |
| 84901 | taatagtgac agaggaacca atgtgtcgag catgaatgtc agtccattga aacagtgccc |
| 84961 | acttttctga ctctgctcct taagagacag ggcctgtaca gcaaggacac agagaagcag |
| 85021 | gttacagaaa aagggctggc tcatccgtgt atgcctggca tttgaggaat gtggctgaaa |
| 85081 | tctcaacact ctggttcaga agcacatctg caatcaaata taacaagaca tggtatgaga |
| 85141 | gatgtctggc ataccaagga gattcctaga atacagcgga taggaaaacc tcattacttc |
| 85201 | aattcccaag aaagagtact actggtagta atcccaacag gagtatccaa gtaactcggt |
| 85261 | aatcttcagt aaagaaaaga aattgtgaaa caattatagt cagtcctcca tctctgtagg |
| 85321 | ttccacatct gtggattcaa ctcacctcat attgaaaata ttaataaata aataaataat |
| 85381 | aacaatataa caattaaaat aatgcaaatt ttaaaagcat aacaactatt tacatagtat |
| 85441 | ttatattgta ttaggtatta taagtaatcc agagattatt taaaacatat gggagagtgt |
| 85501 | gcataggtta tatgcaaata ctacaccatt ttacataaga gacttgggca tctgtggact |
| 85561 | ttgttatctg caagggtcct ggaaccaatt ccccatggat actgagggtc aactgtacca |
| 85621 | agYtgaaaac aaaacaaaag gaaatctatt gcaaaaagga aattcccaaa gataaaaagc |
| 85681 | atgtctatga aatagtcaaa gagccgaaaa tgttgggaag acccacactg ctttccctgc |
| 85741 | cctgtgcccc tttttgcaga tctatttgtg tctttatcta ccagcagata ttctattatt |
| 85801 | ctaatagatt cctgtttttc ccaagagggt ttacttattt attaaatatg atgcaaacat |
| 85861 | ctctctcaga gatgttgctc tctcttccta ggattcctta gccctaaatc tgcagagcca |
| 85921 | attaggtatt aatattgggc tttacaactt tggaccatct gaccaccaag actgattcat |
| 85981 | taaatgtata tggtttcaga tcacattaat ttatcataga ctttagaatt ggctttttag |
| 86041 | aagtactgct ataaggaaaa tctcagcata gcaagtttta tctaatagtc tacttgtatt |
| 86101 | aaagagtact caatgtaaac cctaggaaga cttttaactg ccttttggaa attggttgag |
| 86161 | tgggatttga accgtgtact ctctgtaaag caggaaatta tcacttagta attactaagt |
| 86221 | atttaaaaat gggaaataga aaattacatt tcagacctgg tgcagtggct catacctgta |
| 86281 | atcctaacac tttggcaggt ggaggcaggt ggatcgcttg agcccaggag ttcaagacca |
| 86341 | gcctgggcaa catagtgagc aactccattt ctactaaaaa taaaaaaaat tatttgggcg |
| 86401 | tgatggggtg cacctgtagt ccccactact caggaggctg agacaggaag attgcttgag |
| 86461 | cctagaaggt caagcctgag tgagcagtga ccggccattg tattccagcc tgagcaacac |
| 86521 | agcgagaccc tgtctcaaaa aaaatgtata tttttaaaaa aagaaaatta cattttagtt |
| 86581 | gttccataaa tatcagtaca accaaaccta agtgcaaaat tcccaacaca aatgatcgcc |
| 86641 | tctgggccag ccatgtagcc cccatcttgc tgtcaataat catttccagg ggctgtaatt |
| 86701 | gtcttccttc cccctgtacc accccatcac aggacacaaa ttgttttgct tagtttagat |
| 86761 | agctgtgact aaactaagtg ccaattgtct tttaaaatat gtgttaatca gcactcaaga |
| 86821 | ttgttcctac aaaaatgtca ctccctcact caatttgcat gtgccctcct gagtaggaga |
| 86881 | gaaagagctg agttagaggc agccctctgg gacctgcaca gaaccctgta tgcttccggg |
| 86941 | agtgtggagt gtgtgtctga tctgctgctg ggaaaaggag aagaaatgct gagacactca |
| 87001 | ctgccagggg ctggtatcag gccattttca caggggctgt tggagggttg acagcacagc |
| 87061 | tctactggac cagggagggt cccagccagc agggcctgcc cctccgaaac tgtccctgtc |
| 87121 | cctgtccctg agaggcccca ctgagtgtca gatggcacat aagagatttc cttatgcgtt |
| 87181 | ggtgtgaagg agatgatcag ttccaggagg cccctccccc atgcagaaga gaagaaaatg |
| 87241 | gaagaaaccg ggttctcaga gtggcctgcg ggtgagtgcc gccttgtgct gtcagttccc |
| 87301 | ttcaccttcc agttctgggt gtacctagtg tggtttcatc aaactgctga ggccctggaa |
| 87361 | ttgagggagg atgctgaagg gtgccaggcc atagaagcag tagcaggagc tgcagcaaag |
| 87421 | agctagtgtg tctccagcgt cagcttttgg gccttggtgg catcaaagga gacgtacaca |
| 87481 | gggccactgt actacggatg ggattcttgg aacaaaagtt tgaataattg atgagtgtgg |
| 87541 | aagtgctatg caaaaattca attcaacctg cagttaccag gcattcattc tgtgacaggc |
| 87601 | attattgtga gggtggcaag gagacgggga gtctctgaga gactcagaga agagcagggc |
| 87661 | atggtgtcca cccacaagag atctgaagac tttcaaagta gttgggaaaa cagacataca |
| 87721 | acttttttcc cctccccaca gctagttgag gcaaaagaca tataacttat acagtgacaa |
| 87781 | aatactactg actgttactg acacataaca gcctgggctg ggtcactggt gagaaaaagg |
| 87841 | aggattcttg cttttggggc attcaagtcc tgtccattaa ccatttccca atcccatatt |
| 87901 | tatacatccc attttagaca tattaagctg aagattgatg tgacataccc aaagacactt |
| 87961 | aaggttgaag ctgagaatct gggctagaaa tataaatcag gatgggctgg gagcggtggt |
| 88021 | tcacgcctgt agtcccagca ctttgggagg ccgaggcggg cggatcactt gaagtcagga |
| 88081 | gttcaagacc tgcctggcca acatggtgaa accccatctc caccaaaaat ataaaaaatt |
| 88141 | agccaggtgt ggtggtgcat gactgtaatc ccagctactc gggaggctga ggcaggagag |
| 88201 | tcacttgaac ccgggaggca gaggttacag tgaaaggaga tcgtgccact gcactccagc |
| 88261 | ctgggtgaca gagcgatact tcgtttcaaa aaaagaaaaa aaaaaaaaag aaagaaatgt |
| 88321 | aagtcaagat taaagacaat gggtgagatc agcaaggagc atgtgtgcgg agaagagaac |
| 88381 | accaaggaag gctgcgtgtg gtgggaggtg gccggggggc agagaaagag gcggcggagc |
| 88441 | caaggagata gggcatcgtc tgaatggtga tgctgtatca acagatgtga aattcccaga |
| 88501 | ggtgtgaaac acagcagatc ctttacagca cgatgacagg acacagcatg agcctacctc |
| 88561 | tgccaggtga gaggagcttt ctgcaacctg tgatgggctc aaggatgctg accattcatc |
| 88621 | cgcccattgg gatagcccag gctctgagct cagcactcca cccgtcactg cgattgcact |
| 88681 | aatcctcacc cacccttgca ggcaggtatt actgtgggca cagagaagtt tgctaacttg |
| 88741 | ccagagatcc tgtgtaggaa gccaggtcag gaaacaacca gagtctctct aacagcccag |
| 88801 | gccttgaatg aacaccggcc tgcttcagaa tacatggccc gtgatgtgtt tgaattcaca |
| 88861 | gattcactgg acaggttccc tatagggcct gtgaggaaat ctggtctaac agaatccaga |
| 88921 | aagacaaatt tcgctaaaca ggtcaagcct gatactgctg ctacacttca gctgtgttaa |
| 88981 | gccactcggt tatcagacct gcttctcctt tcatgatttt agtaacacag gcctcttcct |
| 89041 | tgggcccctg ttgctcccac catctcccag gttctcttgt actcagggtt tagtctcccc |
| 89101 | tccccactac taatgatgca tgtgccttac tctctgatca tctctcctaa atctgctact |
| 89161 | cctctgctct ttctgtgcct tatctatccc tgccgagtct aacatgcaga ttttggtcat |
| 89221 | tccaaagtca tgtatagatc taatcacagg gctctctgct taccagctgc tacttggata |
| 89281 | aggaaagcat gccaacacgg tcctccttct tcatgctggc caagtcagca tcattattat |
| 89341 | tacctaagtt tatttctaac acatctcaat atcttcatgc actccctctt gataaaagta |
| 89401 | actgagcata gcaccatcaa taccatcaaa tctgtcattc tcttcccctc tctctgggtg |
| 89461 | ggacaggaag ccaggctgct ctaggaaatc ttccctaaca agcaaagggg acttgcctgt |
| 89521 | cctctcgcat gtgtgatctg agcttgtgtg gatcccagag tgggcattct ggactacttg |
| 89581 | accttgccta tctctccttc acaccctctc atctctccct cctaccacca aaaaacttgc |
| 89641 | atcgtatttc caatctccag acatactttt gaaaccattt atctatctgg tgtgtttatc |
| 89701 | tgtatctagt atgatgtgaa tatgtgattt gtatgtgtgt ctaccactgt tttggtcagt |
| 89761 | ttgtatttct cgtgggtaca gttctatgtg ctcatgtatg tggaacatat gtatactgac |
| 89821 | acatggacct agctccaaat gatctgaaag gaatataatt gtaattgaat atttgcacag |
| 89881 | atatacaaca tacacatgtg atggctgggg gaaatgcatg tgggatttca gtcagcattt |
| 89941 | tattagagaa ggtatgtcat tagtgctgta ttaacaatga atcagcttat ttgtgggtca |
| 90001 | ctgtcaatga ctcctttgca aatcacacat gtaaatattt ctgtctgtgg tctgatgaac |
| 90061 | atgcagtgcc acagtctggg agatgctgag ccatgccctg tgtaggcagc atatgaaaag |
| 90121 | aactgcatga tttaaaagat gctgaccagc ttaaggaaag caatttaaaa acttcctaaa |
| 90181 | aatctagttt gaatgaacaa cagttttcat tttgtgtgtg tgttttttct tttagagatg |
| 90241 | gggtcttgct atgttggcca cgctggtctc taactcctgg gatcaagcaa tcctcctgcg |
| 90301 | gctcagcctc ccaaagtgat gggattacag gtgtgagcca ccgtgtctgc tggccccact |
| 90361 | gttttaaacc ctgattcgac aatcatacat ttaactcatt acctgtcttg ttccttttac |
| 90421 | gacaaactca aagcttttat tttactaaag tatttgggtt aatcttttgc ttttctgtca |
| 90481 | tgttctgaaa tatgtacaat aacagaatcg ctcaaaatat tatctccgtt aaatgttttg |
| 90541 | tggctttagg gagaggtcta acaacatgcg ggaaacaaga aatcaagcgc atccaggatt |
| 90601 | catttataat ctctctcgtt gagtagaagt ccgcatctct cgatattgtc tggttacctg |
| 90661 | catgaagtat tctaaaggag gaaaatagct caaagaggac attcatgtgc actctggctt |
| 90721 | ccagttggcc atttgagtaa gtgatcgcaa ttaactgacg agcggcaggg aaacacttcc |
| 90781 | tggaattctc atctacagac aagaacaaac tggggcgggg cccatcacct tcacctacgc |
| 90841 | gccgggaggg tggcggctgg cgggcggggc cgggctcggg ccgtgacgcc gagagtgcgg |
| 90901 | ggcgcgcggc tgggagcctc gcgcccccgc ccgggcccgc ccccatcccg cccgcataca |
| 90961 | gcccgcatcc cgccggggaa gcgagcccag tccagcgctg cccgtccagt cctcgcccaa |
| 91021 | gatttaaagc ccgcaagttt tgttcttgag accagcgact ttagctccga tgcgggaagg |
| 91081 | aaagccgacc tccgatttgg acatttaaag agctgggctt gaacttcgtg agtttcgctc |
| 91141 | taaactgccc ttgaaatgaa gctggacttg gaggtaaagt cactgggaag ctggcctggg |
| 91201 | gcggggtttc cccctcttct cgtattttag aaacggacag cggcagtgca gccctagttt |
| 91261 | gctgtaagtt tccttacttt gttactgagg cccccagagc tccacgcata agtggtgtga |
| 91321 | ccagaaacct tttaacaaga cccgcctgag cctgcgttag agctcccgct cggaaagtaa |
| 91381 | aagaccatcc taatccgcgg cgctgcggaa ccggtgtccc gtgtgggagg aaccgcggcg |
| 91441 | ttccctgggc gtagggcccg cgaggccagc acagtccgcc tcttggcgga gcgccctggg |
| 91501 | ccggtggttc cgcgcggagt tagtctgtgg tcagttacgt ggtgaaaaca cggctgtgcc |
| 91561 | gcggccgcat ctttccgcgg ccgaggcctc tctgggtggg agtgttggct tcctttccgg |
| 91621 | atcgctaaat ggggaaagtt ctggccgctc ggcgggatac gtctccaggc cacggatggt |
| 91681 | tcgttctccg tgccgcggcc ccgagctggg ctccctgggt ctccagcgcg ggctcccggc |
| 91741 | attgggggct gcgggccggc ccctccgccc cgcccccgcc ccgccgcgcc tcctcggccg |
| 91801 | agcggctcgc ggtctccggc gcgggaggct ccgagtctgc ccactccggg ccgagcgagg |
| 91861 | tctctggagg agaagagtgg cgaggaggtg agggcacgcc ggccctcgcc cggcgggtgg |
| 91921 | cgccaggact tcaggtggga acgcgcgctt gggccggggg cgcgtggctg gcgtggacac |
| 91981 | cggatcgggg cccgccgccc tggcccggac cgcgcacggc ccagcgccgg gaagtcggga |
| 92041 | agccggggag gcctctccca ccgcgggccc cggcagcccg ccctctgaaa gcgcggcgga |
| 92101 | gaaggaggct cgtcccctcc ccggaacgcc tttgttccct ccggcctgcc cgcgcgggtg |
| 92161 | gccagcggct gggacccagg ccgggccgcc gcccaggtgc ggcaggtagg ctcgggggcc |
| 92221 | gggcagctcc ggttggggcg gcttcccggg gcctgcgggt ccccgtccct gaggagctcc |
| 92281 | ggctcctcgg tggcgggaca ggcccgtgcg cgggagccgc gaggcgaacg ccgcgcccac |
| 92341 | caattcggtt gccggccggg ggccccaggc ttgcggccac ccgcctccgg ctggagggct |
| 92401 | gaattcgagt cgaaagcccg tgtcgggctg gaaagaagaa accgccaacc tgagaacgct |
| 92461 | ttcggcgagt tactggcggg ggaaatgggg acagggaagt gggcaggcgg ggagactgca |
| 92521 | gccgcagatc tccctggcgg ggaggtcgtg gccactcttt cctttgactc tgcctcattt |
| 92581 | cattttgaat cctgatgtga cagaggcaat tgcttgcttg gataccatat aggtaaaagt |
| 92641 | aacagttttc aactcgactc ttgactacac cctgtacatt cttggccggt gttggttttc |
| 92701 | ttaggttatg gatcatgtta aaggtacacc gatgtggtaa ccgcacagtg gccgatggtg |
| 92761 | gcctgaggct catatttatg gtaattatct gatgaaagta catccatcag aattggattt |
| 92821 | gtgcgtctgt gcctttattt tgggaaacct tgcctgttcc ctgtggggga tgggagagga |
| 92881 | atgtgaaaag ccgaagttga cccagaaaag gatgattgaa ggtagttgta ttaagtggtg |
| 92941 | gcaccgaaat gattccaccc tgaactttct gaaagggtga ttagtgatca gcagcagacg |
| 93001 | ttataacttt ctcaaaataa atttatggta gattttctat ctggtcacaa gtgaggaggt |
| 93061 | gaaagctgct ttttggggcc aactctttgc ttttaaagca agctaaacgc aataccagaa |
| 93121 | aggtttccat tctgtactta acctgcttgt ccttctcact cttccttatc CtCCCgCaCa |
| 93181 | cgctctgagc attgactgag cactctgagg aggaggctga ctcaggctga cccttcccgg |
| 93241 | ccctgcaagg ctctaaggta gaaccagtgt tatcacagga aaggcccaag ccaaagctca |
| 93301 | gagcagctgt tcctgagaaa gtgggagatg aggatgagta ggaggtagag atgcttataa |
| 93361 | ctgctctgcc cagagaaaac tcagaaggtg cagaagagtt ttcaaaataa agtgcaggcc |
| 93421 | ccatcaagta aaaaatgaaa cattgtattt cattaaaatg gtgatcagtt ttctcttttc |
| 93481 | ataaaagaca ttcaaatggt gagattgtaa aaaaaaaaaa aaagaaaaag aaaactttct |
| 93541 | aattctcaaa aatagaacag cttgaataat aactcatggg ttttgaaatg ggtcatcttt |
| 93601 | taaaatgggt cactttggct agaatcattg cacttggtga ctttcacatt gtaaagggtc |
| 93661 | cagttctttc tgaggcccaa ttgcactaga atctgcattt cagaacacag gaggtatcag |
| 93721 | gaagaaactg ggagaaattc agagggaaat tgtctcttct cagagtaaca aaatgtcccc |
| 93781 | tattcagggg gaattttata tatgctgaag taaatagatc tcagctttga atttttataa |
| 93841 | tacattatgc cttttctgaa atatttccat agccattatt ttaatgcatt gttagaataa |
| 93901 | ccttgtaagg agaggaattc attgtatctg tgttccagaa actgaggcac agtaaattac |
| 93961 | aagagctctg ccctttgata tcgaatctct gtgagcgaag atgtaaccag aacagtgtaa |
| 94021 | atctagaatt actttcctta cggtatgcaa tatctaatta ttatgtatta gtttacatat |
| 94081 | atatagggga tgtaagaatc tttatattta aaggataaga aacttgatca ggtgagatac |
| 94141 | aagatttgaa taaaaaagcg attttttaga aacattttaa ttctacaaat tcagttgctg |
| 94201 | gctttgatat gtaacttatt cagatttctc ttccatagaa ggctttaaca ctagaagcca |
| 94261 | gttctctaca aaagagaatg ttctaccaag tgtgtaggca acaaagccca aaagttcaag |
| 94321 | ttcaaaatac tgttctacag cctaagatcc acctaatatt tcagatttga ctcttttgct |
| 94381 | cctttcctat aacttcctat aactttttca tagtgctcta agcaaagtaa gttcaaggat |
| 94441 | ggactcacct caagtttcct tctcttactt tagaggacca tataatctta tacctgtgtc |
| 94501 | atcctaattg aaatgtattt taagtgcttg tgggaacaag aataacggaa gaccgttatt |
| 94561 | ccattaatgg aataatgggg aacatgagaa ggaccatatt cagtcaatta gggatgatac |
| 94621 | ttctgcctca acagtatttg cgatgtgtta aatggccctt agccatcaga tcagtatttt |
| 94681 | taaaaactcc tacctaatta atgttttttg agaagaagca tattatgagt atagctcagt |
| 94741 | attctaaaaa gaaaaaaacc tgaaaaaaaa atcagccatc cattaactaa cccatcctgg |
| 94801 | taaagctaca caaacagatt ctagagaaag gaaatttgca cagatggaac atctaatctg |
| 94861 | gactgacatt gtcaacaagt tatctcaaat gatcctgaga aaacactggt acatggttta |
| 94921 | gagacaagtc gagctcatgt gactagtaaa tggagaggca cagtatacat ctacttttgt |
| 94981 | tggcatttaa acactctcgg cttttttact ctctttcacc accatcaggt ccagattcca |
| 95041 | gcttgcactg gaatatttat tgaccctttg atagaagagc tacacctgaa acatctctga |
| 95101 | agtcttttta gcatcctatc ctgcccatgg cctactacac agtatgtgat aagttaatgt |
| 95161 | ttgttgaatt agttaaatat acgtattaac ctactttcag ggctgcccgc tgtaatgcct |
| 95221 | agaatagggc aggcacttaa taaatggtag ttaacttaga ctaaatgttg atccaccaag |
| 95281 | acagaaacat gttacatata cctcttgttt tacaccatct tctacttttt gtacctctgt |
| 95341 | gttataaacc ctctatcaag tgttgcttct aaagacaatg tccagaatgg gacgtaggaa |
| 95401 | ctgccactgg gcaacaggca gacactgggt tatatcgtca tcctgtttct gaatcctggt |
| 95461 | ttttcttatt attattcaac cacagctaaa ctttctgatc tccttttttc cgttttttcc |
| 95521 | ctttacccta acttctagcc aaactaagtg atttgacatt tccccactca agccacaact |
| 95581 | ttttctctta tgtgcttaaa aaaaattcct gcgtagtctc tcttggaatg tcttattcct |
| 95641 | tgctccctcc acttcaccct tttttttttt tttttttttt ttttttgaga cggagtctcg |
| 95701 | ctctgttgcc caggctggag tgcaatggtg ccatctcggc tcaccgcaac ctccgcctcc |
| 95761 | tgggttcaag cgattctcct gcttcagcct cccgagtagc tgggattaca ggcatgctcc |
| 95821 | accacaccca gctaattttt gtgtttttag tagagatggg gtttcaccat gttagccagg |
| 95881 | atggtcttga tctcccgacc tcctgatccg cccgcctcgg cctcccaaag tgctgggatt |
| 95941 | acaggcatga gccaccgcac ccggcccact tcacccttta agccagttga aatgctcctt |
| 96001 | gccctactcc tcccttctcc ttttctttct cccatccaag tactaaccag gcccaaccct |
| 96061 | gcttagcttc tgagatcagc caggatcagg tgcattcagc ggggtatggc tgtagacttc |
| 96121 | tctttctgag ctgtgtcttc ctcctttcct ccccaaaccc acatttgaat tctgttctag |
| 96181 | ctcctgctca tttgccacct ctcccacaaa gccttcccca gtttccatct tctccctgct |
| 96241 | tccctcatct cagaggaaag ctcttcattc acagagcacc tggtttgggg tccatagttt |
| 96301 | gttgtccctc agtatccttg gggaattagt cccaggacac cacccccccg cccctgatat |
| 96361 | ccatgcatgc tcaagtccct tatataaaat ggtacagcat ttatattata acctatgcaa |
| 96421 | tattcccatg tactcttttt ttttattttt atgtgtttag agatgggtct cactctgttg |
| 96481 | tccaggctag agtgcagagg catgtagcct tgagctcctg agtcaaatga tcctcctgcc |
| 96541 | tccgcctccc aagtagttgg gattacaagt atgagctacc acacctggcc catgtacttt |
| 96601 | aaatcatctc tagattactt ataataacta atgcaatata aatgctatgt aaacaattgt |
| 96661 | tacacggtat tgtttagtgc ataatgacaa gaaaaaaatg tgcatgttca gtacagacac |
| 96721 | gaccataaat ttttttttca aatgtttttg atctgtagtt ggttgaatct gaggatgcgg |
| 96781 | aacccatgaa cgtacacgac caactgcata tgggtttcta ataacagatt tgtggatgaa |
| 96841 | gcccacccaa cataatgcaa catttcaaat gtatcttagt cagtttttct ggggcaaagc |
| 96901 | cagcctaaca aatctcaaga atgtttgaaa aattctagct tgagtgaacg ttgttcttct |
| 96961 | agtgactcaa ataaagcagt cattgtgtct gaggagtcct agtggggtgg caggggtggg |
| 97021 | gctaggagta gtggctgttt gtagcatgtt ttatatcaca ttaaagggct gggtatgcat |
| 97081 | tttaggcaat aattcttact cttattgata ggagaacttg tattttttat tcatctacct |
| 97141 | tatgatggat aactggttta catctcttca tcaggtttac ttcttacgtg tcattttatg |
| 97201 | agctgacttt gaatatatct tcagattttc cctgccttta cacatgaaaa cggttttgat |
| 97261 | acagcttttt cattagagaa tggcagcttt tccaggccag ggtgtctgtg tctgactcct |
| 97321 | cgcctttcat tttacccaat acttgcttaa aacatcctcc ctgagtccgg tacttttttg |
| 97381 | cctcctctcc ttccttccac cccacctctt tttgtcaccc tcctgcgact ttggatctcc |
| 97441 | atccttggag tccctgaatc ttttttgtgg ttgaaagact acacccaaag gacacagact |
| 97501 | gatgaggtca cttctgccca ctgtctagta ctagtgagac caagaagaag aaggagggaa |
| 97561 | aactgaaatg gaaggtttga aaaagagtgt gttagtgaag gaagtaagaa cagtgctaac |
| 97621 | agaatgcagc aaaacagaaa tgacttcaca cttctggcag tgaagcaaat tctcatccat |
| 97681 | cttgggttgc ttctcttgac cctgcccacc tcctcccctg ccctcccctc ccgatgagaa |
| 97741 | ctgcaggaac acctgtgccc atgccaagga aaaagggcag gtgaggaaca cagggatggg |
| 97801 | gctgggactc acaagctgct ctaagctgcc acagggtctg gaatttgttg acattacatg |
| 97861 | gttaactcgg tatctcgatg cctcagtatc ttctgcaaaa tgtggaggga gatcctttct |
| 97921 | tcctcaaagg ttgttgtaag gcttaaagag ctaccacatt cgtaaggcat ttggaacagg |
| 97981 | gcctggtata tagtagacat acccatggta gtaactgttg ctagactggg taaaaggaga |
| 98041 | agtttcttaa gtaggcaaga aaaaaactga caacagttat atttaaaaga gcaagcaacc |
| 98101 | gtgtcagccc aaacaagtgt gttgcaagaa tgagcacaga gggccaagct cagaaaagcg |
| 98161 | agtgtttgac ctctctgaga cctcctttat atgtcagctt ttttatttgt ttcaaatttt |
| 98221 | gcataatcaa actggttact gggaattatt gagttcatat aacttcccta aaatctaaga |
| 98281 | ataatctata atcccatgcc accagtcccg ttaataaaga cttagggtct gtctttaccc |
| 98341 | atttgttcat ttgaaattcc ccgtctttac ttcccccata accaggaaac agatctacac |
| 98401 | ccatgtttaa cttataaaga gatataagtg agtttacata ggtggagatc ttgtacctgg |
| 98461 | attcacattg taggttttat tacccagctt tcccctctat cccaaagcca tgattgccat |
| 98521 | agtggaattt aaagtctttg gactaacact gaatcaagaa ctaactctac aaatgtattc |
| 98581 | tctgcaggag gataagaatt ccaaatggct tctaattgtt gcccatggct tgaaataaag |
| 98641 | ttccatatag ctaaagcccc agcacaaaaa cacttgaaga cagccattag gtagaatttc |
| 98701 | ttttcttttt tagaggtctt atattggaaa tgtaacagtt gcaaagatat ctaatgtttc |
| 98761 | accttaaaat gtgagttata aattcacatt tcacattgcc tccttcctcc ttgagcaaac |
| 98821 | agactaggca attagtacca aatagtaact agttatattt cttaacaccg attattgtaa |
| 98881 | gtaatttatt aagaaaaaat ctaggaagat caaattatag cttttccagt aaatctgggg |
| 98941 | ctttttattc ctgatctctc tcaacaaggc agtttggctt ctgaagattg gtcctagcta |
| 99001 | tacttaacag gaaacagatg acgagaagaa gccaggaaaa aatacttgga atatagaaca |
| 99061 | aaatgcagca taaagatggt acagaagatt ttatctttct ttcctttagt tatgtgtgga |
| 99121 | caggaactaa aaactctccc acgtgggact ttattaagta ataaaagttt aaatgtaaaa |
| 99181 | gatataaagg aatgaggata taaaggaaat ttttttaaaa actgtgactc accggaggag |
| 99241 | ccttatatag tctactttct aagcatatca cttttaaagg gatcattata ttttcatgat |
| 99301 | gcatggggat attccaagta ttaaattgat tttttaaatg aagaaaatta tcagttcagt |
| 99361 | cttgttttct atgtaggttt cactacagta ttttatttcc cccgcaagga aaaaaccaga |
| 99421 | gctagaatgg aatgattaaa tttcttagtt ttcttctaat ctgttagtct ttccattaaa |
| 99481 | ttatactgcc ttcttatata gaatttctgg gtttgttctt gttttggcaa taattgaagt |
| 99541 | aagagaggat gattttatgg tagaggtttg attccattct agattggtgt ttttcagcta |
| 99601 | tgtagaacac aatccattca tggttcagac aaccgtttta ggaggttttc atgtccagca |
| 99661 | ttaaaaaaaa aaaaaaaaga atagaattgg gcattcatat atatatatat atatgaatat |
| 99721 | ttattaataa aagtttaaaa gatataaagg aatgaggaat gcatatatat tatatatata |
| 99781 | tataccaaat taaagtatca taatactaat acaaggatta gtatcgtttt atgatacttt |
| 99841 | attatataca ctaagggtta gtcttgtttt atgatacttt attatataca ctaagggtta |
| 99901 | gtcttgtttt atgatacttt attatataca ctaagggtta gtcttgtttt atgatacttt |
| 99961 | aggttggtat acatacatat actaagaatg cagacatgtc catggaagtt ggcaatattc |
| 100021 | agcccccagc aggccccagt cagcaggaca gggattaggg gagtcaggtg aggcagggct |
| 100081 | gtataagtgc agggttggag cctgtcttgg tttaccgttt tgacattttg ttcactgtgg |
| 100141 | atttttttca gtaactttga ttttttaaaa atattgcatc aaaatattat actgactacg |
| 100201 | gagtttttgg taccccctta aattgtgcac ctaaaataag tggctccctt gtctccccct |
| 100261 | agtcccggcc cgatcagtat gttttataga gggaatggtg agtgttgggg aactagggag |
| 100321 | cccatgagga ggcggcccag aaggggagga ggagctgatg gtgtgtctga tgtctcctcc |
| 100381 | tttctctagg aagcagacag gaggtgaagt cttcagggtg ggggggacag agcctgggag |
| 100441 | ggggagattt agcatggccg ctgaagagac tgggaaaggg agaaggttcg ggacaagttc |
| 100501 | aggaacagtc acgtagcact gaaaactgct caaagctaga tagtgccatt tgtggtgacg |
| 100561 | ctgcctgcct ggtaagtccc atttccccag cagccctgga ggtgtcatag gaacaggaag |
| 100621 | atgggagggc gctggggtct ggggttgttg gggtgggagg gcaaaggtgt ccaatgattc |
| 100681 | tgcatctgaa acgggggagg tgtgtgagga agaaaggtca ggagactgct gggcagggtg |
| 100741 | gggtggcaga aggttctcga tgaatattta gaagttgcag ctgaggagtg agtgtactat |
| 100801 | agagtgagta tcctggaatt tgaggtctca gaagaaatgc agttctcagt gaagccatgt |
| 100861 | aaacaacttc ctggctgata aggtgtcttg agtgttggga gatcacatga tcaaaatggt |
| 100921 | atacacacca taaggtgtcc ttagacttga gtgtggtgta agtctactga ataaaatgca |
| 100981 | gaaatacagt tcactgttgc ttttcttcct ggaaattgcc ctccccaacc tcaaaccagc |
| 101041 | ccccaagtgg ggcagggtcc atctttagac cctcctgtag cacccagcac aaccctaact |
| 101101 | atatggtcaa tgtctctctt ccccacttag agctccaaga ccagggcctt gtttgtcctg |
| 101161 | cttacccact ctacccattt gttaacccca tcttaatttt ctgatgaatg agcccttttt |
| 101221 | tcattgactc ctcctttctc tccttctccg gagtttattt ttcctccagg cccattgctg |
| 101281 | tctctccacc tagagagctt atccacattc atgaaattag tcatcttcat gctcagagta |
| 101341 | cccacctgga tctctccagt cctgtctaac tcgtcttaga ttattacccc ctggacatct |
| 101401 | gtaccttctt gtctctccat cgcctcgaac tcaatgcgag tctaaaatca aatactcctt |
| 101461 | cactcctaac tcaggaaacc agttttccct cccttgttgg taatgcttga aattagctct |
| 101521 | tacttctctt cttcctcctt tactcgccat cccaggtcat tcatcaggtc ctgctaggtc |
| 101581 | tttgattttc ttgaaagggc cttctttatg ccttccttcc gtccccattt ccaccaccct |
| 101641 | cgactaggcc ttcctcacct catccggcat cagtgtgagc ccttgagaaa ccagcgtcct |
| 101701 | gatcttcagg cattctgcat ttcaccccat accaccatta gccagtttaa tccctcttgc |
| 101761 | tcaaacttaa taaatactga gcaagggagt tactataaca aacaaaacca gaaatttcta |
| 101821 | tgacttcctg ctgctttctg taccccccta agactcctct acctgatttt caaggttctc |
| 101881 | cataagcagg ttcccacctc tctgctttca aatcttctat ctgccataca cagttcttgt |
| 101941 | ctaaaacaaa gattgttcct actcctgcag ccacctaaat cctagtcgtc ctcaggccct |
| 102001 | cctaaaatcc tgactaatcc aacccccacc gatttctcta ctagtcccag agacttccct |
| 102061 | cttgtgcctg gggttggtgt catgcagaca cactgtacct taccaggatt tgcccattgt |
| 102121 | tgtctgtggg aactatgctt tcatgtggga actacgagtc ttgtcacaaa tagagtgtaa |
| 102181 | atgctttgag attggagact gtaaaatact tcttcatgat ctcccactgt gtctggtata |
| 102241 | agaacccgca gagtaaatac tcatatactt gtaggattaa ttgaaacaac tggagactga |
| 102301 | ggttgtttaa cttgtactta gaagtgtgga cctccccatc ttgattaaaa cttcaaaacg |
| 102361 | gatagcaggt ttcacatatt atctcagcat cacaaaagta gactcaacaa agaaatgagt |
| 102421 | tgacagcagg ggtaaggttt acaacaatca gggattattg cagggaaact tgtagccttt |
| 102481 | gggtgttcta actagttttt tcccaaaaag tttaaagagc tctcttgtga aagaatattc |
| 102541 | ttatgagtaa ctgaggggca cggctcctag actgaaaagt atttgggatc tgtcacctct |
| 102601 | tttctgatgt tcctacttct attctttatt cttctgacta cctctattag aaaagataat |
| 102661 | actaagaata cctgtccctt cttctcagtc caaatagaag caaacccagg ttgtatctga |
| 102721 | gatatctgca tattttcttc taagcaattc tttgtcctct tctctcccat gctttttcta |
| 102781 | tttcctattt tcagcaggct ctgaagtcat ttataatttt tactgcccct cggtgacatt |
| 102841 | acatggatat tcatccctga tttgcagatt aaagcaccga atcagagtga ggtgagggtt |
| 102901 | gcccaaggtt acacaataaa tctggcccca aacaggggta acccttgagt ttctagtctg |
| 102961 | ttgattggcc actgacccgt gctgcaggca cacaaaggaa gctgcaccca cagcagtctg |
| 103021 | ttgtggatgg ttgctgagct gcgcattcgg cattgggctt gctttgtttc ctgccaggcc |
| 103081 | cagcattttc ttctaccaga tcggcaggct tgtgggcttc ttcctaggtc cctcccctgc |
| 103141 | actctgaata ggaaagctgg aagctgtgct ttagagaagc tttaagacgc cgaaagaaac |
| 103201 | cagaagagtg agcgccagtt gtatgtgcgt ggtctccatc cgcaaagccg gagctgggcg |
| 103261 | caacagtgtt gacttgtaat tgatcaattt agatcgggcg caggccgggg gagggcagtg |
| 103321 | cttttgattt aggctgggaa aggcctccta gtgactatgt tcaatttgga ggaattcaga |
| 103381 | tgttcttttg ttatacaagt gaagctgtgt aatacaaatg aggagtttta cttttcctaa |
| 103441 | atcttcccct tatcattcaa gtattgagga gttttacctt tcctaaatct tccccttatc |
| 103501 | attccagtat tatcagtgag atctggttgt gatttatgta aatggtggct aaaaaattca |
| 103561 | aactactgag ggggagaatt ctcattttac agcttcacat gctgtgctga actaaataag |
| 103621 | tagcgtggga tgttggcttt gtgacaggtc ttttgtcatt tttcagaaag cattttgact |
| 103681 | tgttgatgtc aatttggaac agctgaaaaa atacaggaaa ataagataaa tacgtacatg |
| 103741 | ttgagggtgg ggacaaaatg aaggttctga accagctgcc ggcttacagt agccatataa |
| 103801 | gcaacagcag caatgcacca acctggtgag taataggcct gattcactgg agagatacta |
| 103861 | gcacctttaa tgagtcagat agatgcacaa tgggtgtggg agcagttgga cttgtgggca |
| 103921 | caaagtctag caagaagctc agacttgcaa acaactgtag gacgtgcaaa gcaagctggc |
| 103981 | attggagctt gccgggcaca gctgctcagg aataggcagc tggttttccc tttgatccct |
| 104041 | gagattccaa aggttacttt cctctttgtt cccttcccag ggtcaattag agtagaaact |
| 104101 | gcagatgctt ttcagttgag aattttccta gaattctcaa aaatgtgtat gctggcttaa |
| 104161 | aatctgccat caagaattct gttaccttgc tttaagcctc cagttccttc cagatgtatg |
| 104221 | gtggaggagg ccagagggcc cttgttttgg ggcttcagag gatggttgtt atctggatga |
| 104281 | gcactgtgga aagactgaga gagcaactga gagaaagtgg gcccctgaat gaaagtgatt |
| 104341 | tcgcaaattt taggcagatg ccaccatcag aaactgatat tttctgacgt ctttctcacc |
| 104401 | ttcctctaga gcattcagtc cagaaatgac cagcctgtcc aaagggggaa attactgata |
| 104461 | ttgatctgtt ccttagagca gtgtttcagt cttttttttt tttttgagat ggaatctcat |
| 104521 | tctgtcaccc aggctggagt gcagtggcac gatctcggct cattgcaacc tccaccttcc |
| 104581 | tgattcaagt gattctcctg cctcagcctc ccaagaagct ggaattacag gtgtgcacca |
| 104641 | ccacacccgg ctaatttttg aattttttat agagatgggg tttcaccatg ttgccaggct |
| 104701 | ggtctcaaac tcctgacctc aagtgatcct cctgcctcgg cctcccaaag cgctaggatt |
| 104761 | acaggcgtga gccaccatgg ccggccttca gcctttgtga tattaaagca cagcaacaca |
| 104821 | tttcccatta cacccctgaa cacacacaca cagaaaaccc aaaagtttca caaaatgatt |
| 104881 | cttgctctta ctactctcag tacactctgt atttaaaaaa aaaaatgctg gttgtggctt |
| 104941 | cctaagtggt gcgtgcagtt ttcaaatcaa tgcccttggc gataaagtgt gccctatact |
| 105001 | gattatctct ggacaaagtc tgaatggggc ttggctctaa tctctagtcc tcattggaca |
| 105061 | ttttacatac ctggcctttg cctccaccct gatgtggagt gatcatgggg gtgggaaata |
| 105121 | tagctggatc cgaaagctct gaagtgggga tggaggtgtc acagctgagg ctaggcccat |
| 105181 | tctgcagggc actcagtgtg tacagttggt tttctatcag gggtcaaccg gcggggggac |
| 105241 | ttgagaacag atctctgggc acaaagcagg gcctttgccc tggggcttgc tatgtggctc |
| 105301 | agcctacacg gctctctccc cgtcagtcct gtccaaagcc caggaaacta atgtaccacc |
| 105361 | cccgaggaag agagcctacc tttccatcca aggaagtgtt ttacctgtgg taagcacggg |
| 105421 | ggacagaatt cttgaggaag gagggtgctg cgtcccagtg gtggaggaaa agagaggacc |
| 105481 | tggtgtaagc agccatggca tggacctcat ccgaggtggc acctggctag ggtcctgacc |
| 105541 | tccaatcctt ccccagtaac catcactttg agtaaacagt ggctccaccc ccggcatggt |
| 105601 | tctttgcacc aacatttggg gaatgcctac caggggtcac acactgagct ggatgctgag |
| 105661 | tgtagggtgt ccacaacatc gtgcctaaaa agtctctgta tggggtataa gaaggtgctg |
| 105721 | gggcaataca gatgagatga gaagcatctt tcagggaatg ggttgatccc aattcaggct |
| 105781 | tcccagagaa ggatgtctgt agacttcata ttagcaaggg aggaaggtag ccaggccaca |
| 105841 | ggactgctgg tgtaaagacc agggcatatg aaatggcaag tgtgactgtg ctttcagcca |
| 105901 | ataatttggt attgtcaaat gatgggacca aacagctgga gaggcagatc ctaaagggtc |
| 105961 | ctgtgggcca ggctggactt catcttgtca ctaactaatg gagaggctct gaaggagtta |
| 106021 | aaagagctca gtttgtctcg tggttaaatc caagttttac aaaggtcacg ctgactgtaa |
| 106081 | agtggaaggt gggctggcca ggggatcatc tagtctgggt gagaagtgat gataacatga |
| 106141 | aggggtgaag agagatttag aagaagtgat tcacaggatt aaacatttaa ataatggaag |
| 106201 | tggagaaaat ggggggggcg gttccagatt tcaggcatag atgaaagaag tgcagttagg |
| 106261 | cacatgtaaa gagaaacagg aacagcaggt tttaggggag aagataacag aatgggtgag |
| 106321 | aaatgacact tgagtaccct agtgtgctag gtaatcatct gtctacttcc cttcatttgt |
| 106381 | catgtatatt cccatttaat ttgcataaag acttcgagtt aaacggtctt accccaattt |
| 106441 | gtcaaatttc tgcgcatgat atggtacaag aaaccgtaag tggctaaggc ggcattggtg |
| 106501 | ttcaaattgc ctgactacaa aggcagtgct tgttggctac attctgttgc ttcccagttt |
| 106561 | agaacatgtt acattgaggc gcctgctgca tttccaaata aaaaagtaca gaaagaaggt |
| 106621 | ggctgtataa atctggggct cacaaagtaa ttttgattac tgagagtttg ctttcaagga |
| 106681 | gcaaactgtg actccttgat tatgaacctt aatttaaaaa aaaagaaaaa agaagtctta |
| 106741 | ctcttattcc tgccttgtct ggggcaagcc ttaatggatt tttactgctg tgaattttct |
| 106801 | tttcattgaa gattttgcct tgatctatgt atctgctttc atcctgacca tattcaagtc |
| 106861 | agtatattca tgaatgtacc tgtttgtgaa atttgaactt aagtatacac gattatagcc |
| 106921 | gtttgggaag cttttttttt ttttttttta agagtaggag tagaaaaagg tctctgtact |
| 106981 | ctgaatggga agacagtgta aagcaatttt ttcccttttc ctgtcctcct ttaaaaaaaa |
| 107041 | taaacagccg tatgcctctg ctaagtacta actacctcat caccttttgt gcagacaggg |
| 107101 | caggttacat ttggttttaa ggaattagga atatgtttct ttccagcacc ttagtaaccc |
| 107161 | acgcgattgt gattcttttc tcttcttgac tgtgataggt ggcatggaat attcacatgg |
| 107221 | gagagccgca tgaggccgcc caccacgctt cctgaaggat gcccgtgtgg aagaattttg |
| 107281 | acgtgccagt gtcctcgttc tacagggtgt tccattcttc cgcaatctca gaaaaatggg |
| 107341 | actaaaagaa actattttgt aaaataagaa gacttccatt tttaatgacc aacatgtatt |
| 107401 | aagatggaca cctactctac gaaacacgaa gttctatggt ctcgaagaag cccgtgcctg |
| 107461 | tttaaaactg atcctaacta aaaacagact tgagtggata tgagaatgtt ggttagtggc |
| 107521 | agaagagtca aaaaatggca gttaattatt cagttatttg ctacttgttt tttagcgagc |
| 107581 | ctcatgtttt tttgggaacc aatcgataat cacattgtga gccatatgaa gtcatattct |
| 107641 | tacagatacc tcataaatag ctatgacttt gtgaatgata ccctgtctct taagcacacc |
| 107701 | tcagcggggc ctcgctacca atacttgatt aaccacaagg aaaagtgtca agctcaagac |
| 107761 | gtcctccttt tactgtttgt aaaaactgct cctgaaaact atgatcgacg ttccggaatt |
| 107821 | agaaggacgt ggggcaatga aaattatgtt cggtctcagc tgaatgccaa catcaaaact |
| 107881 | ctgtttgcct taggaactcc taatccactg gagggagaag aactacaaag aaaactggct |
| 107941 | tgggaagatc aaaggtacaa tgatataatt cagcaagact ttgttgattc tttctacaat |
| 108001 | cttactctga aattacttat gcagttcagt tgggcaaata cctattgtcc acatgccaaa |
| 108061 | tttcttatga ctgctgatga tgacatattt attcacatgc caaatctgat tgagtacctt |
| 108121 | caaagtttag aacaaattgg tgttcaagac ttttggattg gtcgtgttca tcgtggtgcc |
| 108181 | cctcccatta gagataaaag cagcaaatac tacgtgtcct atgaaatgta ccagtggcca |
| 108241 | gcttaccctg actacacagc cggagctgcc tatgtaatct ccggtgatgt agctgccaaa |
| 108301 | gtctatgagg catcacagac actaaattca agtctttaca tagacgatgt gttcatgggc |
| 108361 | ctctgtgcca ataaaatagg gatagtaccg caggaccatg tgtttttttc tggagagggt |
| 108421 | aaaactcctt atcatccctg catctatgaa aaaatgatga catctcatgg acacttagaa |
| 108481 | gatctccagg acctttggaa gaatgctaca gatcctaaag taaaaaccat ttccaaaggt |
| 108541 | ttttttggtc aaatatactg cagattaatg aagataattc tcctttgtaa aattagctat |
| 108601 | gtggacacat acccttgtag ggctgcgttt atctaatagt acttgaatgt tgtatgtttt |
| 108661 | cactgtcact gagtcaaacc tggatgaaaa aaacctttaa atgttcgtct ataccctaag |
| 108721 | taaaatgagg acgaaagaca aatattttga aagcctagtc catcagaatg tttctttgat |
| 108781 | tctagaagct gtttaatatc acttatctac ttcattgcct aagttcattt caaagaattt |
| 108841 | gtatttagaa aaggtttata ttattagtga aaacaaaact aaagggaagt tcaagttctc |
| 108901 | atgtaatgcc acatatatac ttgaggtgta gagatgttat taagaagttt tgatgttaga |
| 108961 | ataattgctt ttggaaaata ccaaatgaac gtacagtaca acatttcaag gaaatgaata |
| 109021 | tattgttaga ccaggtaagc aagtttattt ttgttaaaga gcacttggtg gaggtagtag |
| 109081 | gggcagggaa aggtcagcat aggagagaaa gttcatgaat ctggtaaaac agtctcttgt |
| 109141 | tcttaagagg agatgtagaa aaatgtgtac aatgttatta taaacagaca aatcacgtct |
| 109201 | taccacatcc atgtagctac tggtgttaga gtcattaaaa tacctttttt tgcatctttt |
| 109261 | ttcaaagttt aatgtgaact tttagaaaag tgattaatgt tgccctaata ctttatatgt |
| 109321 | ttttaatgga ttttttttta agtattagaa aatgacacat aacacgggca gctggttgct |
| 109381 | catagggtcc ttctctaggg agaaaccatt gttaattcaa ataagctgat tttaatgacg |
| 109441 | ttttcaactg gtttttaaat attcaatatt ggtctgtgtt taagtttgtt atttgaatgt |
| 109501 | aatttacata gaggaatata ataatggaga gacttcaaat ggaaagacag aacattacaa |
| 109561 | gcctaatgtc tccataattt tataaaatga aatcttagtg tctaaatcct tgtactgatt |
| 109621 | actaaaatta acccactcct ccccaacaag gtcttataaa ccacagcact ttgttccaag |
| 109681 | ttcagagttt taaattgaga gcattaaaca tcaaagttat aatatctaaa acaatttatt |
| 109741 | tttcatcaat aactgtcaga ggtgatcttt attttctaaa tatttcaaac ttgaaaacag |
| 109801 | agtaaaaaag tgatagaaaa gttgccagtt tggggttaaa gcatttttaa agctgcatgt |
| 109861 | tccttgtaat caaagagatg tgtctgagat ctaatagagt aagttacatt tattttacaa |
| 109921 | agcaggataa aaatgtggct ataatacaca ctacctccct tcactacaga aagaactagg |
| 109981 | tggtgtctac tgctagggag attatatgaa ggccaaaata atgacttcag caagagtgac |
| 110041 | tgaactcact ctaaggcctt tgactgcaga ggcacctgtt agggaaaatc agatgtctca |
| 110101 | tataataagg tgatgtcgga aacacgcaaa acaaaacgaa aaaagatttc tcagtataca |
| 110161 | caactgaatg atgatactta caatttttag caggtagctt tttaatgttt acagaaattt |
| 110221 | taattttttt ctattttgaa atttgaggct tgtttacatt gcttagataa tttagaattt |
| 110281 | ttaactaatg tcaaaactac agtgtcaaac attctaggtt gtagttactt tcagagtaga |
| 110341 | tacagggttt tagatcatta cagtttaagt tttctgacca attaaaaaaa catagagaac |
| 110401 | aaaagcatat ttgaccaagc aacaagctta taattaattt ttattagttg attgattaat |
| 110461 | gatgtattgc cttttgccca tatataccct gtgtatctat acttggaagt gtttaaggtt |
| 110521 | gccattggtt gaaaacataa gtgtctctgg ccatcaaagt gatcttgttt acagcagtgc |
| 110581 | ttttgtgaaa caattattta tttgctgaaa gagctcttct gaactgtgtc cttttaattt |
| 110641 | ttgcttagaa tagaatggaa caagtttaaa tttcaaggaa atatgaaggc acttcctttt |
| 110701 | tttctaagaa ggaagttgct agatgattcc ttcatcacac ttacttaaag tactgagaag |
| 110761 | agtatctgta aataaaaggg ttccaacctt ttaaaaaaga aggaaaaaac tttttggtgc |
| 110821 | tccagtgtag ggctatcttt ttaaaaaatg tcaacaaagg gaaaataaac tatcagcttg |
| 110881 | gatggtcact tgaatagaag atggttatac acagtgttat tgttaaaatt tttttacctt |
| 110941 | ttggttggtt tgcatctttt ttccatattg ttaattttat accaaaatgt taaatatttg |
| 111001 | tattacttga attttgctct tgtatggcaa aataattagt gagtttaaaa aaaatctata |
| 111061 | gtttccaata aacaactgaa aaattatcat gagatgtgta tttaaacttt ttcatgaaca |
| 111121 | ttgcttatat aatcattcct tctgtcttaa tgtactacat ggtcttagcc ctgttcctat |
| 111181 | aggattatca tgttctctgc attatagagc cacctaagat gtactttttg ttaaatgact |
| 111241 | catgctggaa tatctggatg gggagatgtt ctttcctaat gtagtcatgt gccacaaaat |
| 111301 | gacgtttcgg ttaacgatgg atcacatata tgatgatagt cccatgaaat tgtaatggaa |
| 111361 | ctgccctata caggtgtacc attttttatc ttttatttca gatttttact gtaccttttg |
| 111421 | tatatttaga tgtgtttaga tacacaaata ctttccattg tcttacaatt gcctgcagta |
| 111481 | ttcagtacag caacatgctg tacaggtttc tagcccagga gcaataggct ctaccatata |
| 111541 | tctaggtgtc tagtaggcta ttccatctag gttctcgtat gtataacctg ggatgtttgc |
| 111601 | acatcgatgt ggtcacctaa agatgcattt attggccagg cgccatggct cacgcctgta |
| 111661 | atcccagcac tttgggaggc cgaggcaagt ggaccacctg aggttaggag tttgagacca |
| 111721 | gcctggccaa catggtgaaa ccccatctct actaaaaata caaaaatcag ccaggtgtgg |
| 111781 | tggcacacac cagtaatccc aactactcgg gaggctgagg caggagaatt gcttgaacct |
| 111841 | gggaaaggga ggttgcaatg acctgagatt gtgccactgc tctccaacct ggacgacaga |
| 111901 | gcgagactgt ctcaaaaaaa aaaaaaatgc atttctcaga acttatcctc attgttaagc |
| 111961 | aatgcatgac tataatctgt tgagagaggg atgaaatcac ctgtagttat agcgctttaa |
| 112021 | gataccattt gaaaaggtta cgttttcctt ttctttgaca cggttagctg tctgaaatac |
| 112081 | agtcaatttt aaccctaatc tcttaatatc aggaatgccc ttacacctac tttggagtgt |
| 112141 | ctggtgcttc gatatagttg catgtaatgt gctctcatct gtttttacct gattcctgct |
| 112201 | cagttcttca catggcatat tgtgtaactc aatctatatt taaaacttgt aagcatccga |
| 112261 | attatttgtt tatggtagaa ctttttactt gcaagtcgtg gtaggagtgt ttgtagttgg |
| 112321 | tactaaaatg tgatgacttg gaagaattaa ttaatgacct atatttgggg actttaattg |
| 112381 | gatgctatag ctgcaatgag aatagaacca gagaactctt gatatgcaag gttattcatt |
| 112441 | ctgtgataat aatgagagga atattcgatg tctctttgag tcagttttcc ttccgatcac |
| 112501 | ttccgcattc tgcagtgaca caatccttaa tcatagcttt cattacaata ttcctttact |
| 112561 | ccagacctca aagactcctc actgcctcca gcatcaaatc taaactcttc tacctggttt |
| 112621 | tcaacgccct acgtaaactt ttcctccttc attccctata gcttggtttt ttttttttta |
| 112681 | tcactgccac tattatctat cacaaatgtc aatcatgacc ataccttgct taagttggtt |
| 112741 | tcccttgcca agagcactgt ttttcctata cctgttgaaa ttttggaaat ccaattctac |
| 112801 | ctcctctctt cccttaagca tctcttcctt cccttctccc caaatttata tttagtcaca |
| 112861 | tatattatcg tactacctac taatcattcc atgtgttttt ttacgagctg taagttctga |
| 112921 | aggcaaccat gccttgtaca gtgtccactt agggttctga ataattaatc atctccccaa |
| 112981 | aatctgaaag ccttctatat accaagcaaa tttgtttagt tatgcagcaa aactcaaatc |
| 113041 | tataaaatca aaaaggaata aggaaataca gattaaacag ttgcagcaaa gactggtgat |
| 113101 | cttaaggtat ttagtcaaag ctggtggtag aacaaaaaca gtagtcttac agattctacc |
| 113161 | tcttgattaa ctcagtggct aattttgcct tttctcaaag ttcttttgca agaacataaa |
| 113221 | gatatttttg tttctttagt tgagtgctgt aactttattc ctttgtgttt ctcataagta |
| 113281 | tgatttggca gtctgccata cgttttttgt tttttttctt cctctttgag acagggtttt |
| 113341 | gctctgtcac ccaggctgca gtgcagctgt gtgatcacag cttagctcac tgcagactta |
| 113401 | gcttcctggg ctcaagcaat cttctcacct cagtctcctg agtaactgag actacaggtg |
| 113461 | caccccacca catcccgcta aatgttttaa tttcttgtgg agatggtgtc ttcactatgt |
| 113521 | tgctcaggct ggtcttcaac tcctgggctc gagcaatcct cctacctcag cctcccaaag |
| 113581 | tgttggaaag tgttgggatt acagacctga gccaccacac ctggcctgtt ataagttaat |
| 113641 | acaataattc atcaactaac ttaaagaaca ctaagactct tacaaaagta ggtatgagtt |
| 113701 | ttagtaaaag tctcaaaaga taaactgtca cttaaggaaa actagagaac atatcattgc |
| 113761 | caaatggtgt ttttcagaga ttataccatt caacgcccac atgctgaatt gggccattca |
| 113821 | ttataactcc aggaacatgg caatcagtaa gagcccacat gtttctttga atacaccgta |
| 113881 | agtgaaagaa tataaagtag tctagttaat attatgttta atcaaggagc acattcctaa |
| 113941 | agatgtttgt tcattcattc tacagacatt tttcagaggc ctgctaagag tcaagcatta |
| 114001 | tgatagacgc catggataaa agcttacaag tcaaccagcg tgggtataaa taatgtgact |
| 114061 | agcactagaa caggtatcat gatggggatt ctgagtataa atattttttt aaaataaatt |
| 114121 | tccccgtgtt atttttggct tttacctccc taatttaggc tttctaaatg gcacagcatt |
| 114181 | tctgaggatg caaacacctt tctacagagc aaaaacagca tttgtataaa tttgtgtctt |
| 114241 | tggggaacca agagacttta aatgtgttta aaccaataat tcagtcaata tcaacattag |
| 114301 | cttacatgta atattctctt gatagcccaa ttttttaaaa cactgtattc ttagaagttt |
| 114361 | ggtttctaag atgtcacttt aagctctttt gcttgttgct tttgtgggat ccacaaattt |
| 114421 | tgttctcagg tacataaatg aaggttagta tagaggataa atattatgat tcttatctgg |
| 114481 | gaaagacagg tgctgaggtg taaaagagag gatcctcgcc acccatgccc cgcaccccct |
| 114541 | cgccccctgc acccacggat gtgcagtctt acctgcgggg ggaaaggtct ccgagcctgg |
| 114601 | cctgctgctc cagctcaggg ttcccccttt catgatggct ttcaaagatt tcttcactct |
| 114661 | gaagtgaaag aaattttggt aagatttgat attgtaggga cctcctaatc tatatttttc |
| 114721 | tctctcccaa tttctgtgtt tgattttggt tttgagtctc tcgataagca aaatatccag |
| 114781 | tttctcatgc cgctttctca ggttttcccc agccactctg gatccattat ggtttgccct |
| 114841 | ttttggcttc ctttaggcac actaaaaact ccttcccaaa agcaggtatc ggccgggcgt |
| 114901 | ggtggcaggc gcctgtaatc ccagctactc tggaggctga ggcaggagaa ttgctcgaac |
| 114961 | ctgggaggcg gaggttgcag tgagccaaga tcacaccatt gcactccagc ctcagcaaca |
| 115021 | gagcgagatg ccatatccaa aaaaaaaaaa aaaagcaggt gtcctttccc cttaatcatg |
| 115081 | aagggctatt catactttac tgccccaccc ctattgattc ataagaggac agtaaagcga |
| 115141 | tcactgcatt caacatctcc tttttttttt tcttgtaaga aatcaaggtc tggaaaagtt |
| 115201 | gcactcgccc tgagaccaga aagtgctgga ggcagagatg aagtaagccc agtgtaggct |
| 115261 | ttcacagatg cgtgataaca agtctaacta aagaagtacc tgggatacta gttttgccaa |
| 115321 | ttcagctcta aaacaatatg gcaatcttat attccaaata tatatatata tatttgtatt |
| 115381 | tatagtagag atggggtttc accatgttgg ctaggctggt cttgaactcc tgacctcaaa |
| 115441 | tgatccactg acctcagcct cctaaagtgg aggaaacata tatatatgtt ttccttttaa |
| 115501 | aataggatgt cagtccaata agaatctaaa ttttagttcc ctctaatata tatatctgac |
| 115561 | tagggaccag ataatatttt tcatgtgtca atatataaaa gttggccagg tgcagtggct |
| 115621 | catgcctgta atcccagcac tttaggaggc tgaggtcagt ggatcatttg aggtcaggag |
| 115681 | ttcaagacca gcctagccaa catggtgaaa ccccatctct actaaaaata caaaaattag |
| 115741 | ccgggcatgg tggcaggcac ctgtaatcca gctatttggg aggctgaggc aggagaatca |
| 115801 | cttgagcctg ggaggcagag gttgcggtga gctgagattg caccactgca ctccagtctg |
| 115861 | ggcgacacag tgagaccctg tctcaaaaga aaaaatatat atatatatat attttttatt |
| 115921 | atattgttta ttaaacaaat aaaaataaaa gatatctcat cagttacgat gtaaatgaaa |
| 115981 | aaattgtgtg tgtgtgtgtg tgtgtgtgtt atgatgtact tcttgtgagt tgtggtcagg |
| 116041 | ctttgaaagc cactatgtat gtgtgtgtgt gtgtacataa aagtaagtat cagtcccagg |
| 116101 | attcaaattc gaaccagtcc cagtcaaatt caatctaatt attttcacca cactaccaaa |
| 116161 | agtctttctt cacattttct atataaagtt gaactaatta atacagcagt gaatgttaca |
| 116221 | ttgtatcctt ttgcagtttc tcatctatga cattactatg cctgaattcc ccactggact |
| 116281 | ttgaactcag tcttactcat ctttggatcc ccagcgtgta atacaggccc ttcataaaga |
| 116341 | gtgaccatta ttactaacaa aatttcctct cactgtgaaa cctgctccca attataaaat |
| 116401 | gaattgtgct ctttcgaact ccgttgatct attgtatgca gggtggatca tagagtctta |
| 116461 | tttcataata acctagtgat ggaaaaataa caatgattca ggagtaggta atggaccttg |
| 116521 | tcatctttta cactgaatga tgagatttcc ctaatttata gattttgtca tgcatgagat |
| 116581 | gccctcagga gcttgcagaa atgccttggc acgttgctct gctgacatgt gtcagatggc |
| 116641 | tggtgtggag gtagagggag tctcctctgc caagcaagtc taatggaata taacactggt |
| 116701 | gccattgagg atgcaatgag aaggacccac agcagatcca gagactgcat tcataaaagc |
| 116761 | tgcacagtat accatgtttt attaaggtat agacagatta gttgtgttct agcatagtgg |
| 116821 | ttttcaaagc ctgaccacaa ctcacaagaa gtacataaca cacacacaca cacacataca |
| 116881 | cacacacatt ttttcattta catcgtaact gatgagatat cttttatttt tatttgctta |
| 116941 | attttttatt tctttttttt ttgagacgaa aggtgaattg tagccaaagt acttttagga |
| 117001 | aattttaaaa ttacacattt tgaaagctct aggaggaaga gagcatattc aagtaaaacc |
| 117061 | tttcttttat tcaaatagta gactaaaaaa ttgaccatag actaactcag caattgctgc |
| 117121 | catatttctt agtgagggat tccttatgag ctccattgaa tgataaaagg atactcttcc |
| 117181 | aaatcagagc aacaatcgtt tcttgtgaca ctgcatcctt tttcccttcc ttcaccctga |
| 117241 | attgccccta gggtatacct aggagaggga gggctggcaa ccagctgctg ttgtgaaagg |
| 117301 | gatgtcattc atggcctgcc ctattgggag gccaatcagg cggaacagcc cctctcccct |
| 117361 | tatggtcatt ttatcctgaa gaaaaagggt ggcaaaaaga tggcaaaaaa gattgctgat |
| 117421 | cacagatcac tgttacaaat acaacaattg gctgggcatg gtggctcacg cctgtaatcc |
| 117481 | cagcacttcg ggaggccgag gcgagtggat cacgaggtca agagttcaag accagcctga |
| 117541 | ccaacatggt gaaaacccgt ctctactaaa aatacaaaaa ttagccgggc atagtggcgc |
| 117601 | atgtctgtag tcccagctac tcaggaggct gaggcaggaa agtcacttga acccggaggt |
| 117661 | ggaggttgag tgaaccaaga ttgtgccact gccctccagc ctgggcgaca gagcaagatt |
| 117721 | ccgtctccaa aaaaaaaaaa ggagggggtg gcaatgagac agggaactgc tctgggtcca |
| 117781 | actcccctca catagcccca acccccatat ccaccccaca aacctccacc tccccacttc |
| 117841 | cagcctctcc agtttcaaag tgacgcttac caacacgcag gctctccagg agcaccttga |
| 117901 | aaggtaactt cttacatctt tccaaaacac ttataatcta attgttcttt ctcccctata |
| 117961 | ttttgaagaa atgcatgctc tcaaaattga aaaaaacgcc tagaggaatt ttgtaaaaaa |
| 118021 | attatatttt tccagtttct ccaaaggaca tataaaccct ttttaaactt agattttgaa |
| 118081 | aagtcccaat agctgatttt caatcgatta ttgaaattgt tttttttttc ttccctaaag |
| 118141 | gggagatacc aacctttgaa caaaattaaa ttaacttttc cccaaagtta aatgatttta |
| 118201 | ctttgtgatt ttaggaatgt gtagaaagtg atttcagttc caactctttt aaagcaaggg |
| 118261 | tatctgggcc aggcgtggtg gctccctcct gtaatcctag cgctttggga ggccaaggtg |
| 118321 | gggcagatca cctgtggtca ggagttcgag atcagcctgg ccaacataga gaaaccccat |
| 118381 | ctctactaaa aacacaaaat tagctgggta tagtggtgcg cgcctgtact cccagctact |
| 118441 | cgggaggctg aggcaggaga atcgcttgaa cccgggagac ggaggttgca atgagctgag |
| 118501 | atcacgccac tgcactccag cctgggcaac agagtgagtc tctgtcaaaa aaaaaaaaaa |
| 118561 | aaacaaacaa gcaaacaaac aaacaaaaac aagggtatct ggtaatttaa ggtgaaagta |
| 118621 | ttattcacta ttataatcaa ttttcttaaa aacaggagct attaggccca attctgagga |
| 118681 | gagaaaaaaa agcagatttc aagggcccgt gccaccttct ttgtttaaag catagagaat |
| 118741 | gataataaaa tgttaaaggt tcagcatttt ctggcattgt aaatttaatt aattaattat |
| 118801 | gtaaattaat tatggaaatg agaaataaag tgaaaaggta tgtcaagtaa gaatcaataa |
| 118861 | ttatcaaaac gttctctacc aaatgggatg caggggagaa gggtgagaag aagggaagga |
| 118921 | aataaaggca aaggcatttg cccacagcct cagtccaggg tgttctacat gacgcagccc |
| 118981 | cagagtaaaa aatactagcc acaggaatga gtggctctgt cttcctctcc agaactgacg |
| 119041 | ggcaaaagag ggggaacctc accttttttt tttttttttt tttggaaact cactgggttt |
| 119101 | tgatatggag aacaggaaga gaatctaccc tagcagcaca ttcacagatg gtttgtctgc |
| 119161 | cctatttgct ccatctccct ggctcttcct agcacttctt ttcctacttt ccattttcat |
| 119221 | tggccgcaaa agccacttaa atattccttt ggaaaactgg gcagtctgtc ccctttttaa |
| 119281 | aaccacaact atttccagga gagttaaagg gctttcggac tgcccatcat tcatgcattg |
| 119341 | tggtgaacta gctcagactg cctctacctt tagtccagat cagctgcctt gggagggcga |
| 119401 | ttcctggagg aaaggatgag gagaggaagg ttttaggaca tcgtatggac tgaagccccg |
| 119461 | ttggagggga agggcaggct tgaggaacaa gcctcagtgt tcctgaggct ttgtggaaat |
| 119521 | gagaaatgaa tagagaaaga taagagactg gatcctaaat gcaattttgc ctatttcaaa |
| 119581 | attttcacag ggtctttttt tttttttttt tttgagacaa ggtcttgctc tgtcacccag |
| 119641 | gctgaagggc agtggtgtga tcatagcttc ctgaagcttg cagcctcgaa ctcctgagct |
| 119701 | caagcgatca tcctgcttca gcctcccaaa gcgctgggat tacaggcatg agccaccacc |
| 119761 | cccagcctca gggtcttttt aatccctaag atcttaaatt tcccagctac tattgttagt |
| 119821 | aatgagttca atttacttac tggttaaatt ggcttttatt attattatta tttattttat |
| 119881 | tttattttat tttatttgag acagagtctt gtgctgtcgc ccaggctgtg gtacagtggt |
| 119941 | gcaatctcag ctcactgcaa gctctgcctc cctggttcat gccattctcc tgcctcagcc |
| 120001 | tcccgagtag ctgggactac aggcacccgc caccacgccc agctaatttt ttgtattttt |
| 120061 | agtagagacg gggtttcacc atgttagcca ggatggtctc gatctcctga cctcatcgtc |
| 120121 | tggactaata ctctaaacgc tattggcaat agtttgttta caggaaaaac atcttcttat |
| 120181 | aaagctgact gcaaatgttt taataaattt gcaaatatgt aattctgttt aaaatatcag |
| 120241 | gaagtgagaa acatgttatg tgataactct ttcccattcc cgaaccaaga aaatgtaaag |
| 120301 | gcagtaagtg tgccaaggac actgaaagga agctgcccgt acatctttga atcttctcag |
| 120361 | gctgtttggt ttcatctgat tttaagctcc atggataaat ttcattgtaa caatttttat |
| 120421 | gtctgtaaat cttaacccat aaataaaatc acaaatcaga aaagtacttt attaggccag |
| 120481 | tctttgtcca agcaaatttg gtcccaaagc tagtttacaa ataattgcca cacagctaca |
| 120541 | aggccagtgg gttgactatc gtagcatcaa tggtgtgggc agggctgcag cctctggggc |
| 120601 | agcattagcc ccaactgaca gagggtatag gtgctcttaa caatctatga gaccccccac |
| 120661 | aacctggact cagctgtcat aagcctttac ttcttatgtt cttcctaagt actttatcgg |
| 120721 | gccaacaaat tcatcccatg aggaatccaa gatggaaacg tcaaaactat ctttggtatc |
| 120781 | atgcttcctc cccctacctt ctctgccttg atcccctcct tcattctaca cattttctct |
| 120841 | gatagtcgtg ttctagccac tagggagaac gtttcagtca atgggtatga tttctgctca |
| 120901 | cctctttttg ccatagctat tagtaagctc tcaccactga tgtctcagct gactgtgaca |
| 120961 | actgccagcg gctggtcagc ctgcctgcct tcatctaacc tgctctttac tgtctaccag |
| 121021 | agtcagcttc gtaatacaca ggtgccctcc tcctcctgtc aacattcctc aaccaaagcc |
| 121081 | tcagtaaact gtctctcatc taccttccca gcattcttga gccattccca ggatagccta |
| 121141 | ggccctttag acctctgaga tgttataccc ttcctcattc tggaatgccc ttcagtgtct |
| 121201 | tacccacctt tcagagttct atttattctt tttttttttt tagatggagt ctcactctgt |
| 121261 | cacccaggct ggagagcagt ggcaccatct tggctcactg caccctctgc ctcccaggtt |
| 121321 | caagtgattc tcctgcctca gcctcctgag tagctgggat tacaggtgcc cgccaccatg |
| 121381 | cccagctaat ttttgtattt ttagtagaga cgaggtttca ccatgttggt cagtctggtc |
| 121441 | ttgaactcct gaactcaggt gatccaccca cctcagcctc ccaaagtgct gggattacag |
| 121501 | gtgtgagcca ccacgaccag ccttatttat tctttagagt tgaattcaaa tgccacctcc |
| 121561 | tttgaaagcc atccttgatg tccttgtgag gaattacttt ctctaccaca ttatatattc |
| 121621 | cttttactgt agaaacgtca ttctgcttta tattataaat tattagaaat atgttgtttc |
| 121681 | ccccatgaaa gtttcaagtt tcctgagttt aggcctgatg atacaatcat tttcatatga |
| 121741 | ctcacagcaa ttgccttagt atatattaaa ttgagctgaa taagccatgt acccagttga |
| 121801 | acacaccaaa tattttagtg atgtcatttc tttattggtg aaagagcaag gccaacgttg |
| 121861 | atcttaatgt tattctctct tttatcttat tcagctccct caacaaaaat acattctcat |
| 121921 | agattaatgt aatcaccacc tcactcctct caactttaga ccctatacta gcctgagaaa |
| 121981 | tccagatcca acttaatgag ttctccttta tcccaagtcc tcatgaccta taaatgtaac |
| 122041 | ctctaggaca atgttacaaa gagtgagatc tttataccac ctgcattctt gtcaccaaac |
| 122101 | gtgtaagtta aaaattcaga ttctgagtgt ggtgactcac gcctgtaatc ccagcacttt |
| 122161 | gggaggctga gccaggtggg tcacctgagg tcaggagttc gagaccagcc tgggcaacat |
| 122221 | ggtgaaaccc tgtctctact agaaatacaa aaattagcca ggcatggtga caggcacctg |
| 122281 | taatcccagc tactctagag gctaaggcag gagaatcact tgaacctggg aggcggaagt |
| 122341 | tgcagtgagc tgagatcact ccatggcact ccagcttggg caacaaagtg agactctgtc |
| 122401 | tccaaaaaaa aaaaaaaatt tagattccag gacccgaccc tacacctccc taattagaat |
| 122461 | ctcagagagt ggggccctgg gaatctgcat aattcataac cttctcagag ctctggtaca |
| 122521 | caagaaacca tgagaatctt tgttctggaa acttcagaga acttggctga gggccacccc |
| 122581 | aggatttggt ggcgtccctg aatctcccat tagctctgac actgactaga cttcaaatat |
| 122641 | cacagaaggc aagcattgaa gtgtgtttat attcaaatag ttttcttgtt gagaatcaga |
| 122701 | aatattaata aaacttttgg gagtcaaagt aatgagaaga caaggaactg aacttgcccc |
| 122761 | ctgatctgtt atcatttggc agtaaggtac atattcaaca ataggataat tctgtataag |
| 122821 | acctgaatct gaccttcttt catctttcac actgacaatt ctgtctctaa acacaggatt |
| 122881 | aaatgaggaa ctaaaattca ccaagatcct gctaggtgtc aggtacagtg ctagctgctt |
| 122941 | ccacacattt ctcatttaat cagccacctg tgaaattgct atgatttatc accatttggc |
| 123001 | agaaaaggac atttagggca caagagatta aataagctgc tggttgggta cattaagtat |
| 123061 | taataaataa tcagatagat aagttaggta gttaagtaag ctgccagatt agtaaacagc |
| 123121 | tagtttcaaa tcccagctcc aacatttact agttgtatga cccttgggga aactcaacct |
| 123181 | ctgagtctca tggcactgct gataaaacgg aaaacatcat cctcacaagg ttctgaggac |
| 123241 | tagggatgga ctcaggtaca cacagcaccc agtacaatgt ctggccttca gccagtgata |
| 123301 | gcaacccttc actcacctct ccattccctt ccagcccctg cattcaaaaa cttttattta |
| 123361 | tttatttttt taaittagga ggctctttgc tcagaatcct gaaaaggctt ttgttacttt |
| 123421 | attttttctt ttttttcatc ttctgggagc acagaatagg cttctgctcc tttaaataac |
| 123481 | tttaacaggc accaaaggaa cactgctagc tctttcttaa ttctgtaggt ccacatttag |
| 123541 | gaaaaagaaa ttgtcagcct ctgacttatt tccagcttac aaaaaggctg tgatgttggc |
| 123601 | agcccgggga aagcagttcc cgtgagtcat gctttcacct ttcagccagt gaagaacagg |
| 123661 | aaatagtcac atcactattg ccaacaagca cagcgaatcg cttccaccac cgggctttcc |
| 123721 | cagatgacgt cagtgagcca agtgcagggc atcacccttg ccagatggcc ccggaagagt |
| 123781 | ctcagctgcc ctgtcaagtt tagcttctca agctccccag aaccagcatg gcaaggatca |
| 123841 | cccctccaga aaaggaaatg atttctctga tcatgatcaa accatgtcat aattttagct |
| 123901 | gtaggtggtg agtatcagtg actgtattat agatggtttt ggttcacagc tatttttttt |
| 123961 | ctcggtatat ttactctcaa gggcaaaggg gtggcattta tcacaatgct atgattcact |
| 124021 | ctactagact ggctgggttt catttcatct ttgagttcta gacctaaggc caaaaggatg |
| 124081 | tcagaatcgc cacccagagc tagatgcatg ctcaatgcaa cctggccatc tctctcggac |
| 124141 | agtggccact aaacacaagc tgcaatgatt attgttgatg ttagtcaatt gatttgtccc |
| 124201 | ccttttaata atccatgatc cacacagaca tgaatctaaa cctttttttt gaacctatct |
| 124261 | ttttcttact agttttctta catattttgg aataacaatt tccctggtta taatacacaa |
| 124321 | tgtgtgaaac actaattgca tttattggtc ctaaattcat tcccaagtct aggatttggg |
| 124381 | gatttagtgc acaaatccac tttcttcctg ctcatgttgt tcatgacttt atggattctg |
| 124441 | cttacatttc ctcccaaagc cttggtcttt ctaagcagaa atctgaccag cctctgttcc |
| 124501 | tactctgctt cctccaccac cttgactgtt aacatacact gttgtgggag aagcttttca |
| 124561 | ttaaatacgc aaacaaatca acaataagga agaaaacaac tgaagcacag aaggatgatt |
| 124621 | gtaacatgga cttgtgcttg tttaacagta cccatactgt ttggtgagtt gcctaaatac |
| 124681 | agagggagat ggcaacttaa caggatgggt ttggagtctg aattaaataa acaacatggc |
| 124741 | aaaagaagga agaaaccaaa agttgggtga ctagggcttc ttggattcta ctcaacactt |
| 124801 | tccacaccta caggcctctg attctatccc caccgctgct cctacactgt ctatgtttct |
| 124861 | cttttacaac aacaacaaaa aaatagcact tgtttactgt tcacaattat tgaaataaat |
| 124921 | cactctaatt tggattcctt tatatgagaa cttccatatg cttaaaactc ccgtagcatt |
| 124981 | tttatagtgt acaggtcata aacatgttgt ctgaagatgg gcaaagtagg tcgtagagat |
| 125041 | aggaagtgag ttcacatcac ggcgtgagtc aaggcagcag catatgagct caggggccaa |
| 125101 | atctgagctg tgatcatgtg acacagtcct caccttcaga gatgacattc tcccagaagt |
| 125161 | ccagggtgca gaaatggata ggctgatgtt cacttttgaa gaggaccaca atgaaaccct |
| 125221 | tttaatatta ctcaatgatt ccacagacct cctgggtgtt aaatcaggtg aatctatttt |
| 125281 | taaaaattgc tatttacttt tttaggtggc tgatcaggac agtatgaaat ttcatacagt |
| 125341 | ttcctaactt gagaaaacat ggtgatgcaa ttcctccaac caggagggat ttatggacag |
| 125401 | cggtggctac gtcctaatct gcccagaata caggatgact aaacaaattg gcaaacggac |
| 125461 | gcagctttct ctctctctaa gaaaagtctg ctgagaaccc tcgttcccac tctgtttctg |
| 125521 | cctccaagaa gaaaagccta aaactcactt tcttccggac tctttcaagg tcagtggagt |
| 125581 | tcctctgggg ttcatattca gatactttgg ggattgatga tggatcataa atgttgctga |
| 125641 | agttcatttg agcccatggc ctctggtttc agaaccattc agccagtcaa atatttaaat |
| 125701 | tttagtgagg caggggaaag ggaacccctt cgggggctgc tatacagcaa cttatattca |
| 125761 | caattcacaa ttaaatacac ttcagtttct aaatatatgt tactttaaaa ttatacagtg |
| 125821 | cttagcaatt ttcaaatttt cattttgtgc tcaaaatatt ttcaggaggt agctgttgtt |
| 125881 | atacccattt gtacaagcaa gaaactgagg tttcaagagg ttatgttgct taaacccaga |
| 125941 | tctgcctgat tccaaacctt atgctttttt taaacttcta ttttgaaata attatattaa |
| 126001 | gtcacatgag gttgcaaaga aatggaaagt ctcatgtccc ctttctccaa acctcatcca |
| 126061 | atgttaacat ctaagaaatt gacactggca caatccacag agcctattca gggttcacca |
| 126121 | gttattcacg cacttgtgtg tgtgcatgtg tgtgtgcagc tctgtgcaat tttgtcatgc |
| 126181 | tctttttttt tttttttttt gagacatagt ttcgctctgt tgcccaggct ggagtacagt |
| 126241 | ggcacagtct ctgctcactg taacctccaa cttccagttt caagcaattt tcctgcctca |
| 126301 | gcctcctgag tagctgggat tacaggcatc tgccaccacg cccatctaat ttttgtattt |
| 126361 | ttagtagaga caaggtttca ccatgctagc cagactggtc tcaaactcct gacctcgtga |
| 126421 | tcttcccacc tcggcctccc aaagtgctgg gattacaggc gtgaaccacc gcgcccggcc |
| 126481 | tgtcatgctc tttttataca tgaaccatac actgttctgc caattttaaa tatgaaggca |
| 126541 | gattacagaa ataaataaaa tgatttttct tttactacaa cagtatctac caataatcac |
| 126601 | atacatgacc aaatagcttt cacttctagc tgccgttaag aagaaagaaa aggatgaaaa |
| 126661 | gaaaaaaaat cctataaacc ccagttcttg aaagcattag tctgtgctat gtgccttagg |
| 126721 | tacagattaa ggaaacacaa tttgttgatt tattgataat tgtgacagca atcttccctc |
| 126781 | ttgtcaggaa gttctataag taaaataaag gtaattttac cttgacttca Ratttagtct |
| 126841 | catcatcttc ctttccccgg gagttcaact ctgtctccgt ataaggttcc tcagacgttc |
| 126901 | tcagaggacg agctagaggg actaagagaa cctgccatta gtgtggttat ttaacttata |
| 126961 | aactataact cagtgcactt tgtctgattt ggacaaatag ctggaccacg tcaatgtggc |
| 127021 | taactataaa agctcacttg agctgctgcg ttgatttcct agggctggat gaaattggag |
| 127081 | gtgaaggaga gacacagagg agaaatagaa tccttgactc cagggacttg acatttcagc |
| 127141 | agaagagaaa aaagtcacac ccagcaccat atgaaacatt aaactacaac aaatctgtac |
| 127201 | atatagcaat gtggtaaaga atagtagatt ttctgtcatt cccattttta aggcccagct |
| 127261 | aaaaggtcac ttttggctgg gtttggtggc tcacacctgt aatcccagca ctttgggagg |
| 127321 | ctgaggcggg cagatcacct gaggtcagga gttcgagacc agcccggcca acatggtgaa |
| 127381 | atcccgtctc tattaaaaat acaaaaatta tccgggaaca gtggcaagtg cctgtaatcc |
| 127441 | tagttactcg ggaggctgag gcaggagaat cacttgaacc tgggaggcgg aggttgcggt |
| 127501 | gagctgagat tgcgccactg cactccagcc tgggcaacag agctagactc catctcaaac |
| 127561 | aaacaaacag acaaacaaac aaaaaggcca ctttcctcat gaagtcttcc atattacaaa |
| 127621 | ctttatggat tcttttatgc actgctgctt tggcatgcat catgtgtaca gcataatgtt |
| 127681 | gcacttgatg ttgttcttgg attcaaagac taaattctag gtactacatt gtattgaata |
| 127741 | tattttccat tataaaggta attaattttt gcttattaca gaaaatctga aaaacactaa |
| 127801 | actcttaacg ctgaagcaca atcacttagt atatttcctt acagtcttct ttcaaatgct |
| 127861 | ctccctcttt ttacacacat acatgtacac acacaatcat actatgattg tattgtaaga |
| 127921 | ggatggccat gcctgctgct cttgctcttt tctcttggcc actctatctc ccttctcccc |
| 127981 | acctgggaaa tatcctttct tcaagctcca tggccatttg gtagtaaaat tgggacttga |
| 128041 | gaggagaagg cctcaaggct tcctaaccca ccttaccagc tttgccaagc attgtgggtg |
| 128101 | atggccacaa ggctaataga taagaggtac tttgaattct tatttgtcac agtcaccacc |
| 128161 | cttgcatatg ctggtccctt gggaaactca caggagacat gattaatccc aggcaggatt |
| 128221 | tgagcatttc tttctttctt tctttttttt tttgagacag agtctcgctc tgtcgccagg |
| 128281 | ctggagtgca gtggtgtgat ctcagctcac tgcaacctcc gcctcccagg ttcaagcgat |
| 128341 | tcttctgcct cagcctccca agtagctggg actacaggcg cgcaccacca tacgcagcta |
| 128401 | atttttgtat ttttagtagc gacggagttt taccacgttg gacaggatgg tcttactctc |
| 128461 | ttgacctcat gatctgcctg cctcggcctc ccaaagtgct gggattacag gcgtgagcca |
| 128521 | ctgtgcccag ccaattttag catttgtagg tcccaagacc aaaatgccat tcattgaatg |
| 128581 | ccaccaatat atcaccctga ttcttagcta tggtagactt gatggaggtt gaccatctga |
| 128641 | tctccagagg ccccttccaa cccttccatt ctgtgagcca actggaagca gcttgggctt |
| 128701 | tctatgggtt tttcatagat gttatgttga aaatcgcaga aaattacact gctaccccag |
| 128761 | gttatacata ttaccattaa tgctgctttg taataacaga caatcctttg ggctcctccc |
| 128821 | tctctgtggg atctctataa agtgagtgat tccaggcaca ataactagat gctagaaatg |
| 128881 | catgcactat aatttgtgac accatgactg agaagcgcct gtccttgaca ctgtaagtag |
| 128941 | agtgaagcag tgaaaggcgg ggccacagaa gccacactgc cagtgttcaa accttgctct |
| 129001 | tccatgcacg agacaaacat gattacagtc acctctgtac cttacctttt tcatctgtaa |
| 129061 | agtagggaaa aatgagaaat cctacagtaa agggctgtga taaggcttta atgagttcat |
| 129121 | ttgtgaagaa tgtagatcat atacaatgca taacacattt tagctattat tgccacatgg |
| 129181 | cactaaaaag ttttttcacg ttccttatga acttcagagg tgttagaagt tgtagccaag |
| 129241 | gcatccagct aacaagagtc agagctgaaa ttccagctct taagcccctc cacacatctt |
| 129301 | ctttatactg tgaaatacaa ttgcttatct tggcacagac tcagttacta aggaatcaga |
| 129361 | caaaaatgtt tgaaaatcct tttagtgact tgctggagtc cacactcagt agatacttac |
| 129421 | caaaaacaaa agtgcaggat tgttctgcaa aacgagctag ttgtttgact taggtcaatg |
| 129481 | acaacctgtt cagacttgac aaagacctat ttattctggg aaggagtgtt atctattatg |
| 129541 | aaatcttgta tttgaaaagc tgagaaacaa ccctgtaatt cctgctttat ttacttgaaa |
| 129601 | caaacatatg tacctggaaa caacgaatga ggccaagtca tagatgtgaa catagtttag |
| 129661 | cttgaggaca gacgaaaggt caagagaacc aagttctgtt tccaatcatc taagaaggat |
| 129721 | gtctctgtgt atgtttgggt atgtctgtgg tatgtgtgtg caagtgtgtg agagtgtatg |
| 129781 | tgtgtggatg tgtgtgtgtg tgtttgcaga taaaaattca ggaaagaaat acactaaatg |
| 129841 | ttatcaaggc ttacttctaa aaagtaggat acatggtgga agacaaggga tcgtaaattg |
| 129901 | tactaaatgg agaattacca aaacacccca caattttcat ataaacaaaa actgaaagaa |
| 129961 | tttattgcta acaggccagg catggtggct cacaactgta attccagctc ttagggaggc |
| 130021 | agaggcagga ggatagcttg agcccaggag ttcgaaacct gcctggacaa tatagcaaga |
| 130081 | ccccgttctc cacaaaaagg aaaaaataaa gacaagaaaa gaatttgttg ctagtagact |
| 130141 | ccccaacaat aaatactaac agaagctctt tattccgaag agaaatgaca caagatagta |
| 130201 | attcaaatct ataataagga atgaagaacc ccagaaatgg tgaataaggg ggtatgtaca |
| 130261 | cacacacaca cacacacaca cacacacaca tgcacacaca cacgtatgta tttctcttaa |
| 130321 | tttgatacat gactatttaa agcaaaaatt ataataccat agtgggggat taacatatat |
| 130381 | agatgtgata tttatgataa gaatagcaca gaggatggat ggggagcata tggaagtatg |
| 130441 | acattgtagt atgtagtatg atttcctata ttttgcatag aatggtatga aactaattca |
| 130501 | atagatcatg acaagttaag gatgcatatg gtaatcccca gtctggtgaa aaacagtaca |
| 130561 | aagagatatg ataacaagcc aatagaggaa ttaaaacaaa atattaaaaa atatttacta |
| 130621 | acccaaagga aggcaggaaa ggaggaaaag aggaataaaa agcacatgag acatgtagga |
| 130681 | taacaaaaca ggaactctaa atccaactat atcaataatg atgatggatg taaacataaa |
| 130741 | aatctaatca ctccaattac aaggcagagg tcacagtgta taaaaaggca agacccaact |
| 130801 | atatgctgcc tacaacaaat atactttaaa tacaaagaca gaagaataga aaacaaaaaa |
| 130861 | aatatgttct gcaaacacta agcatgagaa aactggaatg gctgtgacaa tatcgcacaa |
| 130921 | gatagacttt aagagtattt ctagaggtaa ggagggaagg agagacattt cataattata |
| 130981 | aaagagctaa tatatctgaa agacataaaa accatgaata tgtatgtgct taatgacaga |
| 131041 | ggtccacaat acacgacaca aacaaatgac atgtacatcc tgcccaaggg cagtttattc |
| 131101 | caaggatgta cagttgtttt aacatttgaa aacaaatcat tgtaatttac catattaaca |
| 131161 | aataaagaag aaaaaccata tcattctctc aatacatgga ccaaataagc atttgaaaac |
| 131221 | tcaataatca ttcacgataa aaactctcct aaaaaataga aatagaagag aattccctca |
| 131281 | atctgataaa agacatctgt ggaaaaccta tagcttacat catacttaaa gatgaaactt |
| 131341 | gaactctttt cctaatattg ggaaaacaca cagatgtctg ctctcaccat ttctatttga |
| 131401 | cattgtagtg gaggtcccag tcattataat atgacaagaa aaaaagtata aagattgaaa |
| 131461 | cagaaaaaag taaaagcatc cctattcaca gatgatagga ttatatttct atatagaaat |
| 131521 | ctattcctat tcttaattat atatggtaaa ttccattcat tatagggtta aaaaaatgtt |
| 131581 | aaatgcctaa ggcctttaca ctcaaaacga ctgcattgtt gagagaaatt aaagatgacc |
| 131641 | taaaaaacat aagttataac atattcagga attggaaaag tcaatattgg taagataata |
| 131701 | gttctctcca aattagctca tatatccagt gtaatcccta tcataatccc agcagaaatt |
| 131761 | gaaaggtgat tctaaaattt atggaacaat gaaaaggacc taaaatagcc aaaacaacct |
| 131821 | tgaaaaagaa caacgttgga acatcgcatg acttgatctt aaaggctgac taataagcta |
| 131881 | tggtaatcag gaccatgtgg gattggcata agaacttacc tattttttaa atctttgctc |
| 131941 | aaagaaccaa ttttactact ccattgctaa taaaacatgg gccttttaaa ggtcctgaat |
| 132001 | ggggtctatt ttatgctgtt attattatgt tattattatg atgcatttgt tgttgttgtt |
| 132061 | gttgttgttg agacagagtt ttgctcttgt cgcccaggct ggagggcaat ggcgcaatct |
| 132121 | ctgctcactg caacctctgc ctcccgggtt caagcaattc tcctgcctca gcctcctgag |
| 132181 | tagctgggat tacaggcgcc cgccaccatg cccaggctaa tttatttata tatatatatg |
| 132241 | tatatatatg tatgtgtgtg tgtgtgtgtg tatatatatg tgtatataca tatatgtgta |
| 132301 | tgtgtgtgtg tgtgtgtata tatatatata tatatttttt tttttttgag acggagtctc |
| 132361 | gctctgtcac ccaggatgga gtgcagtggc gccatctccg ctaactgcaa gctctgcctc |
| 132421 | ccaggttcac gccattctcc tgcctcagcc tcccgagtag ctgggactac aggtgcccac |
| 132481 | caccacgcct ggctaatttt ttgtattttt agtatagatg gggtttcacc gtgttagcca |
| 132541 | ggatggtctc gatctcctga cctcgtgatc tgcccgcctc aggctcccaa agtgctggga |
| 132601 | ttacaggcgt gagccaccgc gcccagccta atttttctat ttttagtaga gatgggtttc |
| 132661 | aacatgttgg ccaggctggt ctcgaattcc tgacctcaga taatccaccc gccacggcct |
| 132721 | cccaaagtgc tgggattaca ggcgtgagct accgcacccg gcctttatga tgcattttta |
| 132781 | ttattccttc agtagattgt gtgtttctcc ttgcatccag gcacttggtg ttatctaagt |
| 132841 | gtttatgtct tccatgtctg cactatgcta tatctgtagt ttgttttaaa tagtatctgt |
| 132901 | taaaacagcg accattatcc attgtagaca accagtcaca gtcctcatgg tgctgatgaa |
| 132961 | acacaaaagc cacaaagctt cttttcctca aataacctac ccgaggtgga gggctggctg |
| 133021 | gtttttgatg acacccattt tggtgaagac tcaggatgtg gggccacagg ttgcactgga |
| 133081 | cgagtctgtt tggctgccag tttcatcaga ctcacttgcc tcttgtgaaa tatttcctgg |
| 133141 | acatcatcca gcctctgcaa aactttctgg gctttggcct acagtaacaa aagcaaatca |
| 133201 | tgatgaacag gtctctctgt atacagcctg aggacacgaa gcattccctt tctcccacct |
| 133261 | tcccctactc cccccatccc tacctccctc aggtgacccc ctctgggcat cactatgcaa |
| 133321 | gtcgctgcag gtcctgccat gctccagaat tgggtatcta aggattagcc tctcctactt |
| 133381 | gagacccttg aggacaatga ctacatcctt tcactatggc gtctccagtg cctggaacac |
| 133441 | cctggcacag gagtttgaga ccagcctggt caacatggtg aaatcacatc tctactaaaa |
| 133501 | atacaaaaat tagccgggtg tggtggctgg cacctgtcat cccagctact tgagaagctg |
| 133561 | aggcaggaga atcgcttgaa cccaggaggc agaggttgca ctgagccgag atcatgccac |
| 133621 | tgcactccag cctgggcgac agagcgactc catctcagaa ataaacaaac aaacaaacaa |
| 133681 | ttagaataca atgtggcttg tgtcatgtta gacagagcaa agaattttgg cctgagtcca |
| 133741 | tggatggact tcagggcatt ccccagaatt acacaaacag ttagacaggc tggatataat |
| 133801 | ctgtttgttc ctccactgca tcttctcttc ctttctttgt gcccaggaag ctgattaaaa |
| 133861 | gaagctccta aaccagaggt gcagacaagg tgatgatgtg gctctcagag gaaggtgtgc |
| 133921 | tacctacaac cctgctggct tcatggaaga atatgcttct caaatgcaaa tccaatcaag |
| 133981 | ttatctccct gcttaaatcc aaactcgctc atgtggccca caaagcctac cttgcctgcc |
| 134041 | tctctctaac ctcacccaaa acacacttcc attgctctct aggttccagc accctgacct |
| 134101 | tttggtctgc actgtgccag gctccctcca gccctgaagc ctttgcacat gctgttcctc |
| 134161 | ctgtctggaa aggctctccc atcttgtcta ttcgttctcc aggctcaagt gactcttcct |
| 134221 | gagagccttc tctgacccca gtccaggtca agttcctctg tcacatgcct gaccctgcat |
| 134281 | ccctccttga cagcacttat atcagcttgt aacacatttt tgtgtgatta ttttgttaat |
| 134341 | gtcagcctct cccacaaact gtaagctcag tgagggatgg aagcatgcct atttttaatc |
| 134401 | atcatggtat cctcagcact cagcacagca catggtacat caggaatgct cataagcatt |
| 134461 | aatagagaaa tgactgattt gagtcagacg aagactcagt atgccaggac gttcaggccg |
| 134521 | agagtctaag aggccgccgg agggcttcgg aaccagtgag cccactcaat tcagcctgct |
| 134581 | cagtaccctg tgtgtacttt atcaggaaga aggtacagtc cctccctccc ctatccgttt |
| 134641 | cccaaccaca ggatcaaaat aacccggaag cattaccttt gcatcgaggg tgagcagcaa |
| 134701 | ctcaaactcg ttgtaaaact ccttggggct gagcaacggg tactccttga ctgtgcccag |
| 134761 | gaatgtcgca atgtcgttca aggcgatatc aaccccttct cgagactggc acttgtctac |
| 134821 | agcttgggaa gccaagaggt agattcctgc ctcacaccat tggctgacct tttggaaaga |
| 134881 | aacagtgccc tgtgcacttc gcctgaccac aactcagagc caccgtaatc ctcagcaggt |
| 134941 | ctgagcttgt aaggtgtcta caaggattcc cagacaatgg gaaattgtca tgggacggca |
| 135001 | tcgagtttaa ggggtctaac cactgtaaat tacactatga gggggacaaa cccaaaccag |
| 135061 | ctgatacctg tccacttctc agggaagtca ctcggtcagc aaaatgagtc tcttccatta |
| 135121 | acagtaattg ctacatctcc aggaggagac agctaaatat atatttaatt aaagacaggg |
| 135181 | tttcactctg tcacccaggc tggagtacag tagtgcaatt atggcttaat gcagcctgga |
| 135241 | gaggtctacc ccaggctcag gtgattcttc caccttagcc tcctgagtag ctgggactac |
| 135301 | agatgcatgc caccacacca ggctaatttt tccttccttc ctcccttcct tccttccttc |
| 135361 | cttccttcct ctttctttct ctctgtctct ctttctttct ttcctttttt tgagacaggt |
| 135421 | tttggccatg ttgccgaggc tgctctcgaa ctcctgggct caagcaatcc tcccacctcg |
| 135481 | gcctcccaaa gtgctgggat tacaggtgtg aggcactgca cccacccagc cttatagcta |
| 135541 | aatatctctt aggctggtct aaccatagag aaatgtaatc aatggctttt ggggtttacc |
| 135601 | tgctagtcca ctcttcttgc atccgaattg gttaccagaa cacagggtga ttaataagac |
| 135661 | attagacctg gcccttacat ttcctgggag aagggcatgt cccttttaac aaaaacacaa |
| 135721 | ctttcatctt tggattccca ggtgatccct atttgcattt actggcgttt gtctttcgta |
| 135781 | aggaagcaag aatgcaaagc tttgtaactc agcacagcga tactcaagag tttctggatg |
| 135841 | ctgggaggac attagatagg tgatgagttc taattattca atttttaaaa aagactcatt |
| 135901 | ttctttgctc ttttgaactc cactgagaca cttgaacaga aagacaggga gcccttatgc |
| 135961 | tacctgaaga gttatatgaa aagaagtttc cagtgccaat acctctgcat ttccatttac |
| 136021 | catgtgacct gaaaagcaat ataaagtaac tatacagaga aaaaagatca aaatgcaaca |
| 136081 | cgccaaagtg gttgtctttc taagtgggaa aatgataggc aacttaagtt tttgtcttat |
| 136141 | ttttttccta gattatttac agtgaatatg taccacattt agaataataa aaaatcataa |
| 136201 | agatatttca gaattaataa ttaccattat gtagggatgg gggatagtgg gatatgtacg |
| 136261 | tgcccatgag taaccttttt cttcctacat ttttggattt ccacaataat atgaactcat |
| 136321 | gctttgatat atgctgtgaa aactttctct ttacacatca tgcccagatc tgcaaaaaac |
| 136381 | attaggctgg gattttctgt agagttacta tggctacttg ctttctctct ctctctgtct |
| 136441 | ccctctctct ctctcaaaca cacatgcaca cacacacaca cacacacaca cacaccaggc |
| 136501 | ttataatctc tggagcaaaa atggagttgg gaaaacagca gctgatccca cagcgagctc |
| 136561 | agcacacaga gcaggctgca caccagcccc ttcggagcta cttgcttctg aaacaactat |
| 136621 | atttcattga cattaaaatc cctttagcaa tgggatgagg taagcgcctg ggtgggtgcc |
| 136681 | ccctgccatg caagaggaac agctgtgggg atggagcatg ctgactcatt gccgtcagcc |
| 136741 | acatgctgcc tgggaccagc tcacagggaa gactccagaa accgctgctc ctgctgactg |
| 136801 | ggaacatacc ctagaggtca cctccaaagg gcacccctct ccttgtgggc ccctggcatg |
| 136861 | cgcccttgct gtctatcctg tgaagccttg gtgtggaatc tggcaggcct gactttaatt |
| 136921 | ctggcttccc ctgtgtgcac catgtgtggt cttgggcagt catttacccc agggtttctt |
| 136981 | ggtgacatcc ctgcaccacc tgcaccagaa tcatttagac actttactaa aatactagtt |
| 137041 | cctgggcagt attccagacc tatcgacgct gagtcttcag ggcagtgcat aagggaatct |
| 137101 | gccatataac agctcactag gtgattctcg tgtgctacat tttgagaccc agcagagtat |
| 137161 | cagtttctgc ctctgcacaa tgaggccatt aataccttcc tcagaggttg tcttgaggat |
| 137221 | tataaataga tgacataatt atgttcctgg taggaatgca gtaggtgctc gatacatggt |
| 137281 | agggggtata aaatggttgt tattacttaa gcttctccaa aaagagtcaa aaccctttgc |
| 137341 | ctttatatga gggaagcact ctgcaaatat agtgcttggt tctctgtaca cctgaaaggg |
| 137401 | aatcaagaag tgttcccaca gggccaagcc aaaacacact cttaaagtcc ggctccacac |
| 137461 | agatagaaat gggcttcagt taactttaat gggatgtggt gggatggcca gagcactttt |
| 137521 | taccttcgtg ccaggtatac ttctacaccc caggatctgc acagttttta atgcctctcg |
| 137581 | aacatctttt cacataaagc actcaagcct ctcagcaatc acacaaggaa gggaggacga |
| 137641 | gtatgatgga agcttcttca cagaaaatct tgcagacatc atgttcttgg ctgtgttttg |
| 137701 | ctcaccttgt ccagctgtct atgaaactct aaggactttc ctaaaatgtc ccattttttc |
| 137761 | ttgtttccat tgatgaaatc gtcacagagg tgcctgagct ccacacaccg gggcctgatg |
| 137821 | gcatctgctg cataatggtg gctttggatg agctggtccc caaccagtgc cagcagcwgg |
| 137881 | gccttttcca ggggctcctg caaagtgaac acccacagcc aggcgtcaga agtcagagca |
| 137941 | tcatgaggct gagagctgcc tggtactgtg tgctccaagc ctggagggag gctgtggaga |
| 138001 | tgctaaccca ggatgaaggc tggagaacct gagaaagctc ggaatggttc caggcccagg |
| 138061 | aagttaagcc tggcccagag ttgtccacat gctgaacaac agcagtcatt cattcaaata |
| 138121 | cctgttgagt tctgggctag acatcgagga tatagtgtta acaagcccaa aattttcaga |
| 138181 | ttaatggaga attcagatat caactaaatt acacaaatcg ttaaattatt acaattgcaa |
| 138241 | taaactctag ggcagaaaag catggagtgc acataataag agattttgaa tacccctatt |
| 138301 | aactaaagga acaagaagag ggactgacac ctgtccttga ggagagtggg gggtgagctg |
| 138361 | aagttgaaac actggtgaaa attggatttg gacaactcaa aggtggtcat gacacttaag |
| 138421 | aaatatgctt gtctaggctg ggcgtggtgg ctcccacctg taatgccagc actttgggag |
| 138481 | gccgaggtgg gcggatcacc tgaggtcagg agttcaagac gcgcctgacc aacgtggaaa |
| 138541 | aaccccgtct ctactaaata caaaaattag atgggcgtgg tggtaggtgt ctgtaatccc |
| 138601 | aactactcag gaggctgagg caggagaatc gcttgaaccc gggaggcgga gattgcagtg |
| 138661 | aattgagatt gcgccactgc actccagcct gggtgacaga gcaagactcc atctcaaaaa |
| 138721 | aaaaaaaaaa aaaaaaaaga aatatgcttg tctaaaccct ttcccaaagc ctgtaagggc |
| 138781 | cctgtctaca ctgaccctgt ctgctcaatc acatttccta cctctttctg catgacactt |
| 138841 | cgctctaacc acacgtgcca agttttcctg tttgtttaag cattccttca ttcatccttc |
| 138901 | tcatattatt gagaacctgc tatttgccaa acactgtcat aggtgctggg agttcattgg |
| 138961 | taaagaaagc aggcaaaaac ccccacctca tgaaatgaag cttacatttt aatgggagac |
| 139021 | agaggcaata aacaagtgca tgtgtaggtc atatggtatc ttagacagtg atgagtatgt |
| 139081 | ggagaaaaat tagatggtgg ggagggcagg gagtgctgga gctagtattt taaatcggat |
| 139141 | ggtgagacag tctccctgag aaggagtact caagctatgc agaaaagact tcacatagaa |
| 139201 | agcctgagac taggccgggc tgtggtggct cacgcctgta atcctagcac tttgggaggc |
| 139261 | cgaggcaggc ggattgcctg agttcaggag ttggagacca gcctcggcaa cacagggaaa |
| 139321 | ccccatctct actaaaacaa aaaaaattag ccaggcatgg cagcatgcgc cgatagtccc |
| 139381 | agctactctg gaagctgagg caggagaatt gcttgaacct gggaagagga ggttgcagtg |
| 139441 | agccaagatc gtgccactgc actccagcct gggtgagagc taggctctgt ctccaaaaaa |
| 139501 | aaaaaaaaaa gagaaaagaa agcctgacac tacagcctta gaaagaaaga cccgatttta |
| 139561 | agattggccc tttgttggca tctaggaact tagatttttg ggaaggtttc ctccattccc |
| 139621 | tgatgtgaat ggttcatgat ccctgaactg tttgtgcaaa cagtatggtt tatggtgatt |
| 139681 | acttgctttt tcttctggga gtctgaaatc ttggtacttg ccagacagaa gctgctgaca |
| 139741 | tgaccagcca ccaataaaac ctctgggcat tgagtctcta atgagctccc ctggtagaca |
| 139801 | acatttcaca catgttgtca caacccacag acgggggcag gaagtatgtc ctgtgagact |
| 139861 | cccacaggag aggattctaa gaagcttgtg cctggtttcc tccagacttc acctcgcatg |
| 139921 | cctttctcct ttgctaattt tgcttagtac tttctcatct taatagatca taactctaat |
| 139981 | acagctacat gcagaatcct cctagtgaat cttcgaagaa atgtgtgcat ggtcttggga |
| 140041 | gcgctctgca tacaagctga gacctgaagt cagggacaag ccgtgcagta cttggctggg |
| 140101 | aggtgaaggc gtgtttgaca agtttgggta gcaggaagga ggccagtgtg gctgcagcag |
| 140161 | agggagcaag aaggaaatga gtggaagact aactagagga aagagggggt tccatagccg |
| 140221 | gggtgagagg aaagcccctg ggtttggagg gaggatctcg atcatgtttt tgaaaggacc |
| 140281 | actcccggta cagtgtccag aataagagga aatgcaggga gactcattaa ggggctgctg |
| 140341 | caggaatcca gccgagagat acggcttacg gctggtcacc aaactagctc ctgactcgac |
| 140401 | ccttctctgg attgttcttc cctgggtcat gcagagctga gttcctgggt cacctcctca |
| 140461 | cagcgcttcc ctggcgacta tatcttaagt cattetctac aacctattcg cccagtcacc |
| 140521 | taggccctct cccacacttt aattctttaa cagcattatc tctatctaaa aactattttc |
| 140581 | tttatttact ttaatgtaga attcctccct cctggctggg cgcggtggct cacaccagta |
| 140641 | atcccagcac tttgggaggc cgagacgggc agatcatgag gtcaggagat cgagaccatc |
| 140701 | ctggctaaca cggtgaaacc ccatctctac taaaaagaca aaaaattagc caggcatggt |
| 140761 | ggcacacacc tgtagtccca gctactcggg aggctgaggc aggagaatag cttgaacctg |
| 140821 | ggaggcggag gttgcagtaa gctgagattg tgccactgca ctccagcctg ggcaacagaa |
| 140881 | tgagactctg tctccaaaaa aaaaaaagaa ttcctccctc ctccactcac tcccaccaaa |
| 140941 | atgtaagttc catgagagca tttagtaggc atgcaataaa tatttgatca acaaaataaa |
| 141001 | tgaatgagcc aatgagctac atgatgcggt gacctgcttg gctggaactc tgtgaagcaa |
| 141061 | tcagcacaga tgactgccac attccaaaag gtctccagga gcagagagcc catgagcccc |
| 141121 | cttgccagcc acactaagca tccagtgcat cactgcactg ctttagctgt ttacagtaac |
| 141181 | acaaggagtc acggtaactc caggtgcgta catcttgccc ctctcttaac ttgcactggt |
| 141241 | ttatggtttc aacaatttcc aaaccccttt cctcttaccc tcccagtcat tcacgaagcc |
| 141301 | ccgcagggac cgtcgccttc ttaatgcctt tcaaattctg accccatctc tgccacctcc |
| 141361 | ttgtcactgt ctgctcaggc ctcatggctt ctcatgggga caactggtct ccctgctttt |
| 141421 | cttcaggctc tccttcaaat catgctccag actgctgaca aaggagcaat tccaacatat |
| 141481 | cttattgtgt ctacatcact cccaagcttc aagccctttc ctgggcgccc agggtcttca |
| 141541 | ggagcaagct taaactcttg agcaatgcac acggggaatt tcattatcta gctcatacct |
| 141601 | gggtgtgcct gacttaccaa gtcctcttcc acttcctcaa ctccattctc tgctgcaacc |
| 141661 | atactaatta tccacttatt gttccccaaa tattcaggca gcttcaggcc tccatccctt |
| 141721 | ctccacctgc tgtctgccta gaaagcccat ccttccctac tcdccctcac ccatactcct |
| 141781 | ctggggccaa ctcgatctaa atcatatttc agacttcacc ttctccagaa aactttctct |
| 141841 | gtgcttctct tgatcagagc acctgcttca ttatgttgtg accacttatc tgctgcctgc |
| 141901 | gctatgccac agacacctat ggtccagaac cagctcttat tcaactgaaa acagtgcatg |
| 141961 | ctgcatctta ggtacttaca aataaatgct gcacaaaaca aagaggagta ctggtataga |
| 142021 | aacaagtgac acaaatcaag tagtggctag ttaaaaggac tgaggcaaaa atacccagaa |
| 142081 | cacttgttct aaacagcaaa ggcccaggtg cactggttac cacccctaca agatgactgg |
| 142141 | aatactcatt ccctgggcag tgattttttt tttttttttt tttttgagat ggaatcttgc |
| 142201 | tctgtagcta ggctggagtg cagtggcttg atctaggctc actgaaaatt ctgcctccgg |
| 142261 | ggttcaagcg attctcctcc ctcagcctcc cgagtagctg ggactatagg cgcccaccac |
| 142321 | tatgcctggc taattttttt tttttttaat ttttagcaga gatggggttt caccatgttg |
| 142381 | cccaggctgg tctcgaactc ctgagctcag gcaattcacc cgcctcggcc tcccaaagtg |
| 142441 | ctaggattac aggcgtgagc caccgcgcct ggtctgggca gtgatttttg actctttggt |
| 142501 | tcactgctgt gtcctcagaa cttaaacagt acctggcatg gtaggagatg aataaatatt |
| 142561 | tgcagaatag atgtcgaatg aatgacagac ctttcctagc actgctcagc taccgcagac |
| 142621 | tgaacctagc acatgttcca tagcccagaa tttatccctc tacctctgta atgttaataa |
| 142681 | caacagctaa catctactga gagcttaaca gatgccaggc actgttctga atgctttaca |
| 142741 | tttgcttatt tccttaactc ttcacaacaa accctttgat acaggtactg ttttaccaaa |
| 142801 | gggaagtgga gcacaatggc ccaaggtgac ccaggtagga aagagaagag ccaggcttca |
| 142861 | aacccaggca gtcttgctcc aggatctggc tcagaccaac atacacagag aaaaatggct |
| 142921 | gcacttgttc tgcctaaact tagagacctc atttggttgc tcgaacttgt ctgactttag |
| 142981 | tcaaatatag aaacatgaga cttggcatga aagtctctgt tgacactttt ttttttttta |
| 143041 | agtccagctg cctaatttat taagaacagg gcagaatttt ctgggtccag ggaaattcac |
| 143101 | cacaggatac ttccaaatca ccctgtggtg atcagagcct gcccttccct cagcatacag |
| 143161 | tatttcaccc ttcagaattt tccagaagac atttgagatg ttagagggaa gatgtgtgta |
| 143221 | acaggtccaa atgggtctag ggagaaacgc ccataaaggc aactgaggag gccgggcgca |
| 143281 | gtgggtcacg cctgtaatcc cagcactttg ggaagccaag gccggcggat cacaaggtca |
| 143341 | ggagttagag accagcctga ccaacatggt gaaaccccat ctctactaaa aatacaaaaa |
| 143401 | ttagccgggt gtggtggagg gtacctgtag tcccagctac ttgggaggct gagacagaag |
| 143461 | aatcgcttga acccaggagg cggaggttgc agtgagctga gattgtgcca ctgcactcca |
| 143521 | gcctgggcgg caagagtgaa actccgtctc aaaaaaaagg gcaactaagg agcaacccgg |
| 143581 | attcagccac cacatggctg gaaggtcact attacagaat tgaaaggaca acaatagttt |
| 143641 | ctgaccactg actactgacc accaaccata ttgcaagctg accacatgaa gtccctacca |
| 143701 | cacatctaac tcatttaatc ttcacaaggt ctctgtgagg caggaattat tacctctgct |
| 143761 | ttacagatga gggggaccat attcagaaag gctacgaaac gtgactaggg tcatacagct |
| 143821 | ggtacttgtt agagccaaga tttgaatcca tccctatccg acttccaaag cctgtgttct |
| 143881 | tgtcaccttc cagcccacct ggcctctaca catgtgctat gaaatcctcc tggtgcctgc |
| 143941 | aaagaaattt atggtgaaac ctccaaattg aagcttattt ttttagttta tatacctccc |
| 144001 | actcaggata aatagtcatc aaaatctcca aagtaaaaaa gaaagagtga gggaaaaaat |
| 144061 | ggctaaaatc ttctgatcac aagcccatct gggatctttc agatgctgaa aattccagaa |
| 144121 | ggctggatcg tcaagtttca gcttagaagt tgcaatcaga aatctttatt gaaataagtt |
| 144181 | tatttccccc cgaggactct gctggtataa cagatgagag atgagagtgc ctactaggga |
| 144241 | agaaagtggc gagaaagcga gtgatgctac tctatccggg aatctagaac aaacccacag |
| 144301 | aggatccaca gggatggagt gtgtgtatgg ggaggtgggc cagatgaaac aagaaaggca |
| 144361 | gaaagctaat ggttgttgaa attgaatgat ggacacttgg agttcattgt gccagtctat |
| 144421 | ctgcttctct gtgtgtttga aaatttcaca catgtacaca aagccatgac cctccaacaa |
| 144481 | gatgacatcc ttagatgtta atggcctggg ttccatgcct tcttagacac agcaccctta |
| 144541 | tggggagagg tcaaggctga aatcaggtgg ttcctccacc ctgtcctggt ctgttccctg |
| 144601 | ctggcccctc agcaagggtc tcagtacggc ccacagtcaa aaccctgcag caagttctgc |
| 144661 | ttttatagaa gaccttctgt aagtggttga aactactgtt tttcagaatc aggaaggagc |
| 144721 | attcaaaaga ctgctaaacc ctcaaacgag aacaagataa agaacaggct gaatcagcat |
| 144781 | gcgacaggag cctggttagt gagttgactg aggttacttg tgagaatgat gtcactgtgt |
| 144841 | ggaataagga agctggcaac accccagagc cagcgtgtgg ctgtgctggg agggagctgg |
| 144901 | ccccttagtg ccgagtaaag gacaaactcc aggcagatat ttgtcagatt gtggccagac |
| 144961 | acagtcttgt tcctttaaca ctttaaagga caaatggaaa gattagccaa gccctaatca |
| 145021 | tctgaagaag ccatgtgtct gagaagtctg agggaagata tattgaaaac gatctcagtt |
| 145081 | acgatgagac agctttgttt gatttacgca aaggcagaga cacaggtgta ctacatcctt |
| 145141 | caggaagcaa gtttagaaat aagatctgca agtcatagga tgtgacaggt ctgcaaatcc |
| 145201 | tgcaagtcac aggtcatcca cagtgggcta gtctagctgc ttcaagaatg ttgcccacga |
| 145261 | aaggtgggtc atgggttcac agagcattcc tgtgttccat aaccacaggt ttcatcccta |
| 145321 | actctggtca gcaacttttg aagtatatac caaggaccac aagttcaagg aagtgggcag |
| 145381 | aagaaagaat gtgatgcagt catgcagatc catcgccact attcaagaca cagcccagag |
| 145441 | cgccttccaa gggctttctg ttccactgag aataaaattc aaatcctcac aaaagatctc |
| 145501 | agggtgcaac aggactacct ggcctctgct catctctgtt cactcatttc ctcctggccc |
| 145561 | acctgctcta gcaatgttcc ttgaactcac caagctcatt tccactttag gacctttgca |
| 145621 | cctgcagctc gctcttgctt tgatactatt ccctaagtct ttgcatgatt acacagatca |
| 145681 | aacagatctc agaccaaagg tcgtcttctc aggcctttcc agaccattct agctaaagta |
| 145741 | gcatccccag tcactttcta ttatatcttg ttttcttttt tatatcactt gttactatct |
| 145801 | gatgttatta tttatttgat tgctttttag tgaactgtct ctctccagta gaatgtaagc |
| 145861 | tccatgaggg cagattctgg actgtctggc tcaccgctgc acccacggaa cctaggataa |
| 145921 | ggaatacctc ttgatgaata aataaccctc tggataggtc agtagctact ttcatatata |
| 145981 | tatgaaggca ttttttttga tgaggcactt tttcttaata tatgaataag caaaaaaata |
| 146041 | tagtatctat attcagtaaa aaattatttt gaaaaaacta aaatgatata aggttggggc |
| 146101 | tgtcctggag aatctaaggt atctagtcat catatatatg aaattcaact tttccattgt |
| 146161 | ttgataaatg ttcctgatga ctcatgtgtc tttagcacta gtttatctgt caaatggtca |
| 146221 | ctggtaagag aaagagcgct cgctgtgaag ggatgggatt cctgaatggg gatctggata |
| 146281 | cacagctggg tttgtgtgtt catgcatgtg cacaagcacc tgcagctcag aatctacaac |
| 146341 | caacagctct tagagtcagt gtggccttgg tatactttgt tttgtatcct ttaggggtgt |
| 146401 | gtgtctccaa ctttaacgta caagtcaatc acctggggat cttcttaaaa tgcagattcc |
| 146461 | aattccaggg tggggtctga gattttatat ttctaattag cgcttactca ggtgacatct |
| 146521 | gtgctgctgg ccagaggctc acactttggc aaatctctag tactgcaaaa ttgccgtctg |
| 146581 | agaaacatgc ctccagatta gctaagaaag gaagcgctaa ccacagggga cttggtcccc |
| 146641 | aagacccaaa aatatagaga acctaatttc aaacaagcag aaaggaactt ctctggaaag |
| 146701 | agacgactca gctttcttca tttgtaataa accaaatctg taaacactta aaatggaatc |
| 146761 | atttctaaat gctgacttgt gtgcggatct gggacactgt ttaattccag tatgggactg |
| 146821 | taaaatacat attcttttac aagtttcaca tttacaactc ttgggacatg agaaaggaga |
| 146881 | aagctttgcc aattctgtgt agcaatggaa ctaacatgga ccaatttccc ccatctaatt |
| 146941 | gtcttgctcc aggtataaaa ctagttgttt ttttttttct ggtttctcct ttgaaagttt |
| 147001 | cccatcctta ctaccaaccc cacaaccccc agccccctag tccaggctcc agggaggagc |
| 147061 | tcaagctgat gggtgagcct ctgatataat tgttctggtg agtgatgagc ctgttgtgac |
| 147121 | cttctcccac ttggctgctg accacgtgag agggcagggc tggtccagag tcctcacccg |
| 147181 | acctgagcgt ccaactgcaa ctgtatgttc cggcagcttt aataggactc tgtgctgccc |
| 147241 | gtattattca tagcagttgt taatgtgcct ctctccttgg gatcctgggg tgactgaagg |
| 147301 | gcaggactgg gcattcctgt gtcctttagc aaccttccaa tagcaatgac tggacatgat |
| 147361 | ccatcattgt ccacagcaac ctccctccca gtacacaaaa atgtcagaaa gcaaacctgg |
| 147421 | cttttttcct ccagtttttt gtgttcctta agaaKctgct ccacgtgcat cacgctgtct |
| 147481 | ccaatgcctg taaactctgc ttgctcttcc agcaaattat ccagggcaag cttagcctac |
| 147541 | aagaaacatt agaacagtcc agaagtaaac caacactcac tcacctgaag gtataggttt |
| 147601 | gttatgcttc aagaaaactc aaaattccaa aaaggattca agacttgtat atatctatat |
| 147661 | atgttaaaaa tttttttttt gcagctcact aactttcaaa |

[0423] Following is a KIAA0861 genomic nucleotide sequence that includes the KIAA0861 SNP “KIAA861-AA” (SEQ ID NO:).

| | |
|---|---|
| +TL,1 | GTGCCTTTCTGAACCCTGTGACCCAGCAGCCTCCATCAACTCGTCCTACCTGCCATGCACAGCTCCTCTGTGCCCCTGTACCTGAG |
| CTCATGCTATTCCCTCTGCCAGGATGCCCTTCTCCTTCTCCACCAGGAGAAGAACACTTGCCAGTAAGACCCAGTTCTAATGTCAC | |
| CCCTTCCTGACGGTATCAGGAAGAGTCA[G/C]TGATGGTGTTTTATGCTCCCAGAGAATTTGCCACATTGTGTTGTGATTATTTT | |
| TCCACATCTGTCTCCCCCACTGGAATGAGAGCCTCACTCATCTTCATACCTCCCTGGTCTCTACCTGGTGCCAGAACCATCCTCAG | |
| GGCAGGGGAATGCTCAGGAAATAGATATTGAATAAAATAAGTGTATCCATCCATCCATCCA | |

[0424] Following is a NUMA1 region genomic nucleotide sequence (SEQ ID NO: 4).

| | >11:71420751-71612100 | | | | | |
|---|---|---|---|---|---|---|
| 1 | cctgccatgg | ggcctggcac | atagtagcct | gctctgaatt | tttgttgaat | gaatgaatct |
| 61 | cagcaaattt | ataattttcc | aataaacaat | acttccttct | tgagtcacaa | agcagccact |
| 121 | gcctgtataa | ttctttttat | tttattcaaa | ttcgtttctc | atttgatcct | ccccaccagc |
| 181 | ttgtgaggta | atttaatatc | tgYactcaac | agaaaaagag | attttctcat | tcattcaaat |
| 241 | aagcacctac | tgtgtgccag | gccctgtgct | gagtgctggg | gatacagagc | tggataagac |
| 301 | atggtccctg | ccctcaagga | gtactctgtt | taatggagga | gatggacaag | aaagctcctg |
| 361 | ttgcagtgca | gttggtaagt | gctatgacag | aggtttgtgt | aggtccaaga | gagcttgact |
| 421 | ggccagcctc | aaagctgtga | ccacctgatc | caaagtcttt | caaattgtag | attgctcttc |
| 481 | ttcctattct | tcttatgttc | tactttcctg | caagcctttc | tctggccttc | tggagtttca |
| 541 | ttgtataagg | taaaataggt | gatccataag | ttcctctctg | gctttggtag | tttactttaa |
| 601 | aggccactgt | ggaagataca | ggatgtggag | ccagatgaat | gtggattggg | acccctagcc |
| 661 | ctgccacttg | ttcactgtat | gaccttacct | ttctgagcct | tgaagtcttc | atccctaaaa |
| 721 | atgggacaat | aattgctacc | tcacataggg | tgataagatg | atatgaagaa | aaagtgcaat |
| 781 | agaacaatgt | aagagtcacc | aaggacacca | caaacagtgc | caacttctgg | ctaaaataat |
| 841 | tgaaaatatg | tctgtaatac | agaggatttt | tataatagta | actactagct | ttttttttga |
| 901 | gatggagtct | cgctctgtcg | cccaggctgg | agtgcagtgg | cacgatctcg | gctcactcgt |
| 961 | gcaagctccg | cctcctgggt | tcacaccatt | ttcctgcctc | agcctcccaa | gtagctggga |
| 1021 | ctacaggcac | ccgccaccac | acctggctaa | ttttttgtac | ttttttagta | gagacagggt |
| 1081 | ttccccgtgt | tagccaggat | gtctcgatct | cctgacctca | tgatctgcct | gcctcaacct |
| 1141 | cccaaagtgc | tgggattaca | ggcatgagcc | accgtgcctg | gccagtaact | actagctatt |
| 1201 | tatttattta | tttagagaca | gggtctcact | ctgtcRccca | ggctggagtg | cagttcactg |
| 1261 | caacctctgc | ctcccaggct | taggcgattc | tcctggctta | gcctcccaag | tagctgggac |
| 1321 | tacaggtgtg | tgccgccaca | cccggctaat | tttttttttt | tttttttttt | ttttgtctat |
| 1381 | ttttagtaga | gacagggttt | caccatgttg | gccaggctga | cctcaagtga | tctgcccgcc |
| 1441 | tcgggctccc | aaagtgctgg | aattacaagt | gtgagccacc | acgcccagcc | ctgtaactaa |
| 1501 | catttgatag | tgctttacaa | tttcaaagca | ctttttaaaa | atagagatga | ggtcgcactc |
| 1561 | tgtcgcccag | gctagagtgc | agtgccatga | tcacaactca | ctgcagcctc | atcctcctag |
| 1621 | gctcaaccaa | ttttcccatc | tcagtctctg | tagtagctgg | gactacaggc | atgctccacc |
| 1681 | ttgtctggct | attttttaat | ttttattttt | agtagagaca | aggtcttact | gagtttccta |
| 1741 | ggctggtctc | gaactcctga | gctcaaaSaa | tcctcccact | tcagcctccc | aaagtgttgg |
| 1801 | gattccaggt | gtgagccatt | gtgcctgccc | tcaaagcact | tttgtgaaca | tccttattta |
| 1861 | tacatgtagc | atttcatgaa | catgtattat | ataccaggaa | atgggctctg | tacaacccag |
| 1921 | taaaaaaggt | agcagggttt | tcctgtttta | caaagaaaat | cacctctctt | gtctcaaaga |
| 1981 | ggtgatttga | cttatctgag | gttatccagc | tactaaaaca | tcacttaatc | catattgagt |
| 2041 | tttttgacct | aaaatttcac | atccttttca | ccgtgtctct | ctcttttgtg | atcagtgcaa |
| 2101 | Wccctggaga | atagagctgt | gtgtgttctt | taagacaaca | ctagaaggaa | gatatttggg |
| 2161 | acctttccct | agcctgagaa | accatcactg | cttgcctggc | cacagcaagg | aggcatgggc |
| 2221 | agggaaggac | cttgactttc | ctccctaggg | ttcagcaggg | ttggtagtaa | cctagtcagc |
| 2281 | tctcaggaac | cacacaggct | tgtgctggtt | attcagacag | attactaaat | tgttcattag |
| 2341 | ctcccatcac | agatagaata | gtggctcctg | atgacaggga | cctactcttg | tagcatttaa |
| 2401 | aaggctctgg | tttggccaag | caccagtggc | ttatgcctgt | aatcccagca | ctttgggagg |
| 2461 | ctgaggtggg | aggatccctt | gagcctagga | gttctagacc | agtctgggca | acattgcaag |
| 2521 | accccatctc | tagccaaaaa | aaaacaaaaa | aaaaggccct | ggttccttca | gggaaccatc |
| 2581 | tttcttgctg | agtctagtag | ctgggatcca | ccaattaggt | tgtacactgt | cttcattggc |
| 2641 | tcctggggca | cactactcct | ccttcaggag | catgaacaac | cccattctac | ttcaccacca |
| 2701 | ccacacactt | tcatccaact | caaaggtact | tcttaagtgc | ctctctccct | tctccctcag |
| 2761 | aagaaaattc | atttcagaag | caaattcatt | acacatcatt | tctttcattt | ttggcctgtg |
| 2821 | gataggagca | aagctgtatt | cagactaacc | gggcccaggt | acaaacaacc | tgtagctcat |
| 2881 | tctacctctg | attcatctct | tgaattctgt | ttctgaacaa | ctagccttcc | ctgcctgtta |
| 2941 | atcttctgag | catagttgtg | tttaatactt | tttacttcct | catttgaggt | gacatagctg |
| 3001 | tctaaggtca | gctgtgctcc | ttctttgagg | cagaaactgc | ctttttagga | atcttttcct |
| 3061 | tggtctgaaa | ccatgaaaat | acaaagcata | gctgggtgtg | gtggctcacg | cctataatcc |
| 3121 | aaacactttg | ggaggctgag | gcgagYggat | catgtggtca | ggaattcgag | accagcctgg |
| 3181 | ccaatatggt | gaaaccccgt | ctctactaaa | aaaaatataa | aaattagccg | ggtgtggtgg |
| 3241 | tgggcacctg | tggtcccagc | tactcaggag | gctgaggcag | aagaatcgct | tgaactcagg |
| 3301 | aggtggaggt | tgcagtgagc | tgagattgtg | ccactgcact | ccagcttggg | tgacagagcg |
| 3361 | agactctcat | ctcaaaaaaa | aaaaaaaaaa | aaagaaaaaa | aatacaaagc | cctagttctt |
| 3421 | gagtatatgg | aggcatttct | gcagttaagg | gagtgagcag | ctttggatag | taactgaagt |
| 3481 | tgctcagtaa | gtcctgagca | aagaccctgg | tgtccccatt | gatgtgagaa | taaaggattc |
| 3541 | tggtgatcag | gaccattaag | gccagaatct | ctgtgtcagc | tgcactaacc | ttctctcctt |
| 3601 | tccccaggtt | ggtttataag | tggttcctgc | taatctataa | aatcagctat | gccactggca |
| 3661 | ttgttggcta | catggctgtc | atgtttaccc | tctttggtct | taacttatta | ttcaagtgag |
| 3721 | taccctttgt | ttttgttttt | gctggagttt | ggggaggagt | gactgttgag | atgtacctct |
| 3781 | tgttgcaagt | cgtggttatt | aacaggaggg | acgtaatatc | caggatagga | gacttgggtg |
| 3841 | ctgtgggggg | atgggagaag | acaggctctc | catgatttgt | tctggcagaa | agcaaggaat |
| 3901 | gtctgaatat | atacaaagtc | agagtcctaa | atcatatttt | ccaaggcttt | atattttagt |
| 3961 | ggaaaagtct | agtaaccaaa | gtaagcataa | taattatcat | aacctgctat | ccataattct |
| 4021 | atcaccttaa | cagagctgtt | tttctcgtca | gtgtgtactg | ttcatttgca | gcatccactc |
| 4081 | tgcatgaatg | gccttacgtt | caactaggcc | aggggttggc | aaactgtgcc | ctctgtgcca |
| 4141 | aatcagccca | caacctgtta | ttataaaatg | aagttttact | ggaacatagt | catgcccatt |
| 4201 | catttatata | ttgcctgtgg | ctgtttttcc | actaaaacag | cagagttgaa | tagttgtgat |
| 4261 | aaagaccata | tgggctacaa | aacctaaaat | atttaccatc | tggcccttta | taggaaaagt |
| 4321 | ttgctgactc | ttgggctaga | ccgtctacct | acatgaccgt | ggttggctac | agctagcaac |
| 4381 | aaattgactt | agaagaatac | aaaataaata | atagagcaga | gtggtgtctg | caagtcttca |
| 4441 | cagtagactc | agagcttagg | tgtgagggaa | tgagaYgaca | cagatgggtg | tggaagccac |
| 4501 | ctggcctagg | agccccattc | ccccaggaac | acatccagtt | tcaagaatgt | cgcagtccag |
| 4561 | atgtgttgta | ctaatcacag | gtcataagca | gtgttgcctg | taatatagct | gacattcgac |
| 4621 | aagatttcta | aggaaacagt | tctggaaagt | taacctgtgg | atgttaagtc | ctgcttcatt |
| 4681 | gttgggcact | taggttgttt | tcaatttagt | attatcccag | ataacgctgc | tctgttgctt |
| 4741 | cctaagggtg | cattcctagg | gatggaattt | tggctgttgc | ttcagttgtc | ataagccttc |
| 4801 | caaaagatct | ttattagctt | acaggtcctc | ccaccccgaa | ttgagtcaga | tgccaagaaa |
| 4861 | tcctgagctc | agagactgga | gcatgcagtg | agtcaatgag | gcagatgagg | gtggaaataa |
| 4921 | tgctttcctg | gatgaaatac | tggtggctgt | gggctgtgga | tcaagaggag | ccctaagcct |
| 4981 | acgacagtgc | actgaagcta | gagatctagg | attcaaattt | aagataatga | atgggatgat |
| 5041 | cactggcctc | ttccctgagc | ctagttatat | tgtaggcagg | agtctctgaa | aggagtttat |
| 5101 | tttaggacaa | gtaaaaataa | atcctggcca | ggtgtggtgg | ctctcacttg | taatcccagc |
| 5161 | tatttggaag | gctgaggcag | gaggactgct | tgaggccagg | agttcaagac | caagctgggc |
| 5221 | aacatagtga | gactctcaac | tcttaaaaaa | aaaaaaaaag | aaagaaagaa | agaaaattag |
| 5281 | ctgggtgtag | cagtgtgcac | ctgtatcccc | agctactcag | gaggctgagg | tgggagaatt |
| 5341 | gcttgagccc | agaagttcaa | ggctgcagtg | agctatgatt | gtgccactgc | actccagctc |
| 5401 | aggtgacaaa | gggagacccc | catctcgaaa | aaaataaaaa | taaataaatc | ctattttata |
| 5461 | tagtgagagt | gcactcatga | aattctttct | tctaggggta | gtacaggctg | aaggaataaa |
| 5521 | caggctcctg | aagggtttag | aggaattcat | cactgtagag | tcaaacacat | cttgtcaaag |
| 5581 | aaaacagata | tctcctggta | actttctaac | ctgtatggtt | aaaaaataaa | ataaaaatca |
| 5641 | agattctgca | ttatgggatt | ctgcattatg | gttttttgtt | tgtttgtttg | tttgtttgtt |
| 5701 | tgttttgaga | tggagtcttg | ctttgtcgcc | taggctagag | tgcagtggct | cactgcaacc |
| 5761 | tccacctccc | gagtagtggg | gtcaaatgat | tctcctgcct | cagcctcctg | aatagctggg |
| 5821 | actacaggca | tgagccacca | cacccggcta | atttttatat | ttttagtaag | gatggggttt |
| 5881 | caccatgctg | gcgaggctgg | tttcgaactc | ctgacctcag | gtgatccacc | tgccttggcc |
| 5941 | tcccataagt | gttaggatta | caggtgtgag | ccaccacgcc | tggcctctgc | attaagtttt |
| 6001 | aaagataatt | cttctataat | tacagtttct | ttttacttgc | ctgaactcta | caatgaggaa |
| 6061 | aacagaattg | agaatcttga | tcatttttgt | gctactgatc | aaattaagtg | gtgtaagatc |
| 6121 | aatRatttct | agtgagttaa | atattcaggg | ttcataagca | aatgcagctt | tgtatataaa |
| 6181 | tataatttat | aactaagcac | atacatacgg | ttctttgtac | aaatatttta | acagataatt |
| 6241 | ttctataaca | aagatttata | gactcaaggt | tgcaaattat | cggtccttgg | aattattaaa |
| 6301 | acaaaccttc | tgatgttata | ggcaagatct | ttatccttct | tgttaaatag | acttggacca |
| 6361 | aaatttaact | ttgatgatat | gatacagatt | atttatattt | gtagtttata | attttatagt |
| 6421 | aactgctata | tattaataaa | tatttactaa | ttttatcttt | ttttcttaaa | cctgtgtttg |
| 6481 | acaagctgtt | tctgtaaagg | tccaaatagt | aaatatttta | ggtcttatgg | gacaataggc |
| 6541 | caaatctagg | atatcatgta | ggtacttata | taacaagaga | aaaaactcct | accctgtccc |
| 6601 | accctctttg | cctggggaag | gggccaggtc | tcaggtagtg | ggcatgcttt | gtgctctgtt |
| 6661 | gtcataagct | gagacaatct | cagaaagagg | ggcatgtggc | caccggagta | attttcagYc |
| 6721 | tctgcaccag | tgacacccag | attctggcat | gccctttcct | ccttatggat | ggctcagctg |
| 6781 | tttcaacttg | agtggctagc | tggaagagag | acagctcagc | aaggcagctc | acttagtgtc |
| 6841 | cagaagttac | caacagtgga | gtccccacta | tgtaggtccc | gatgagcata | ggtcctgggt |
| 6901 | agctgcaagt | cattgtcacc | agttRgggga | ggcaaggact | aagagcagag | tgaggaaaag |
| 6961 | gggtaggagg | ggatactgta | gcttggtctt | cacagcctac | agtgctagct | agcctcctca |
| 7021 | agaggtgttc | atgggccata | taaaaataga | cagcagactS | gatttggtca | tagtttgccc |
| 7081 | RcacttgctY | tagcctttgg | gccttctcgc | tttgggccct | gccttgtgtg | tcccagagta |
| 7141 | gtaatccata | gaagatatgt | ctcagggtgg | gtctttctag | ctctaatgct | tcccttgcag |
| 7201 | gatcaaacca | gaagatgcca | tggactttgg | catctccctt | ctcttctatg | gcctctacta |
| 7261 | tggagttctg | gaacgggact | ttgcagaaat | gtgtgcagac | tacatggcat | ctaccatagg |
| 7321 | ggtaagttca | tccgggttct | taaatactgc | ttcttgacac | ctccaaattg | ctcaagttga |
| 7381 | tgtcacttgt | ttaatggaag | agaaaggcac | tagggtgaga | taagccacat | aaaatccttc |
| 7441 | aagatgtgca | tatgcatgga | cattccttcc | ttaaagtttg | gaaagcaaca | cagccataaa |
| 7501 | aaaagataaa | accatgtgcg | ttgcagcaac | atgccagctg | gaggccttta | tcataagcca |
| 7561 | gttaatgcag | gaacagaaaa | ccaaatactg | catgttctta | cttataagtg | ggaactaaac |
| 7621 | attggatatt | catggacata | aagatggcaa | cagtaggcac | tggggactac | aagaggagga |
| 7681 | gggagtgggg | acaacRgttg | aaaaactatc | tgttaggtaa | ctgtgctcat | tacatgggca |
| 7741 | acaggatcat | tcgcacccca | gacctcagta | tcacgcagta | tgcccatgta | acaaacctgc |
| 7801 | acatgtaccc | tctgaatcta | aaataaaagt | tgaaattatt | aaaaaaaaaa | ttagccagat |
| 7861 | ctcagatgta | ccctataatt | tttctcttta | gggccattat | aggaaagagc | cactttatcc |
| 7921 | agcaggaagt | taacattcat | tcagtagata | ctttttaatg | cctgctatgt | gtctagacac |
| 7981 | atagctatRt | gccagaatta | caaaagtgta | caaaaataaa | catggttttt | gcccagataa |
| 8041 | actttactct | taggtgggag | agatggctat | tacagtaaca | aacacagata | aaaataaaat |
| 8101 | tacaacttta | ataagcatta | tgtaggaaag | gttcatgatg | ctgtaaacac | atgtagtagt |
| 8161 | gtcatttgac | ctagtcttgg | ggctcaaaga | tggcttcctt | gaagaagtga | ctatggagct |
| 8221 | gacttgaaca | atgaatagca | gttaagtgga | tgaagtgaga | accaggcaga | ggaaagagca |
| 8281 | ttcataagag | tcctgtcacg | ggagaaagtg | tgggtgtttt | tgaggaacta | agaccattgc |
| 8341 | ggttgtatgg | ccaagaagtg | cctggagaag | tagtgactag | actagaaaaa | agcctgtggg |
| 8401 | ccaaattaaa | gattttgatt | tttatgctaa | aaatcctggg | aggggccggg | cacagtggct |
| 8461 | cactttggga | ggctgaggca | ggcagattgc | ttgagcccag | gagttcaaga | ccagcctgag |
| 8521 | caccatagtg | agaccccatc | tctacaaaaa | aatgagacaa | aaaaaaaaaa | aacctagccg |
| 8581 | ggcgtggtgg | cacatgcctg | tagtcccagc | tactttggag | accaaggtgg | gaagtcactt |
| 8641 | gagccttgca | gtgagcttgt | tcatgccacc | aaactccagc | ctgggcaaca | gagcaagacg |
| 8701 | ttgtctctaa | ataagtaaaa | attcacaaaa | tgtataataa | tcatgcaaag | gcacaacaat |
| 8761 | aaatgatggg | gcacaaaagt | gcttagtcca | tattggtaat | tgtttttgaa | ctgcacagtg |
| 8821 | gtaggagttg | ctccttacaa | tttttacttt | gtgaactctt | attccttgat | ttaacccaca |
| 8881 | gccgctacaa | caacagccac | tgtcacttac | tgctttacca | aaaattgggg | aagctttcat |
| 8941 | acttgctttg | ttaatcttta | actgtatgtg | taaagctaca | catttcattt | caacatttaa |
| 9001 | tattaaaagt | gttttgagtc | tttacttaag | agacaatttg | gtgtctctta | aatagaggtt |
| 9061 | tagtgatgtc | tttgtgacag | aaatatgaca | caggaactga | actcttgttt | ctatcaatta |
| 9121 | gcctgtggta | aaattggttt | tgttatatgt | cgtttcattt | aaagtcacag | tttccaagaa |
| 9181 | actgtcagtg | aagtgaggac | atactgtatt | tgagaagtat | tttggactta | gatatagttt |
| 9241 | ggttctgaag | actgaaggga | aaaatacaaa | ggaaatatag | gtttcaaagc | tgagatttct |
| 9301 | gattcggcaa | ctgcttggat | ggtagtacct | ttcactgaga | taggaaatgc | tgcaagagca |
| 9361 | gcaggtggac | atcacggaga | gatgcttaaa | tatgggtaaa | ttaacaRcca | atctgagaaa |
| 9421 | cgcaagtaaa | tatttctatt | ttttttttca | gaatggaaat | atatctttat | tgttttgctg |
| 9481 | tttataaaag | tagtatgttc | tctttgtaat | tatttaaaca | acacagaagt | gctccctgtc |
| 9541 | tcagtgtcat | cccccaagac | cccaccccaa | gaaggaatat | ttccatcacc | ttgggtaact |
| 9601 | ttaatctagt | accgtttaag | gccagggact | ttgtccctca | gtatcatggg | aatattctaa |
| 9661 | ttttttctct | actggatcaa | attgaaaaca | gtacattgKa | tcactttatt | gacagtttat |
| 9721 | taggttcctt | tttgaacaac | tgtcttgtgc | tttaccttca | tttccctctt | acctatttgt |
| 9781 | gtagacattg | gatcttcctt | taaccagttt | actccccaga | agagatttct | agaccatgtc |
| 9841 | accattttga | ccattttgaa | gtatacaatt | catgcattaa | ttacatttgc | agtgttctgc |
| 9901 | aacaWtttca | ctgtctaatt | ccaaaatttt | tcttcatccc | aaacagaaac | tctgcccatt |
| 9961 | aagcagtaac | tcattacccc | ttcYcacagc | cctggtttac | ctctaatata | ctttccatct |
| 10021 | ctgtgaacat | gcctattgta | gatatttcat | gtaaatggaa | tcatacaata | tttgtccctt |
| 10081 | tggctttttt | cacttagcgt | agtgttttca | gagttcatcc | atgtatagaa | tgtatcattc |
| 10141 | ctttatatgg | ctgaatagta | ttccattgtg | tgtgacaccg | catttggttt | attcattcat |
| 10201 | ctgtggatag | gcacttgagt | tgtttccact | ttttggctac | tgtgagtaac | gctgtgagca |
| 10261 | ctggcgttta | agtgtgttta | gtccctagtt | tcatatcttt | tgggtttata | ccgagaatgg |
| 10321 | aattgcttgg | tcatttggta | attttatgtt | taactttttg | aggacatgcc | aaactctttg |
| 10381 | ctttcttaat | tatgataatg | cttaagtgaa | tatctgtatt | catgaagctt | ctttgacact |
| 10441 | tcctcttttt | tttttttttt | ttgagatgga | gtctcggtct | gttgcccagg | ctggagtgca |
| 10501 | gtggtgcgat | ctcggctcac | tgcaagctct | gcctcccggg | ttcacgccat | tctcctgcct |
| 10561 | cagcctcctg | agtagctggg | actacaggcg | ccccccacca | tgcctggcta | attttttgta |
| 10621 | tttttagtag | agacggggtt | tcactgtgtt | agttaggatg | ctctcgatct | cctgacctcg |
| 10681 | tgatccgccc | tccttggcct | cccaaagtgc | tggggttaca | ggcgtcagcc | accgcgccca |
| 10741 | gcctcctctt | atttctttaa | attccttgaa | gtgaaattaa | tgggtcaaaa | ggtgcaacaa |
| 10801 | tttgagatac | catgctaaat | cctatctgaa | aggcttgaac | cccttttgct | gctgccacaa |
| 10861 | atgtctgaga | atgcccttgt | caccaaacca | acatggcact | taatatttca | ctgttttaaa |
| 10921 | tgttggagaa | tattgttgtc | catttctggt | ggaaccatag | tctggcgaca | gaatggcttg |
| 10981 | cctgacacag | cttttgatca | ccagccccaa | gtccttctcc | ctccccttcc | ccttatcctt |
| 11041 | tggtgctgat | ccagcccagt | ttataggttc | tgttacatct | aacttcccaa | ctgtctctag |
| 11101 | tctggtcact | tctccccatc | tgcccagcaa | agatgaggtc | gatttgactt | gtaaaagatt |
| 11161 | accttttcta | aacagtttaa | aaaaaaaaag | atgtcctcta | actctgggcc | tcccgctgcc |
| 11221 | actgtgcctc | ttctctagaa | ggcctgaggt | ctctgtggag | cttcctactt | tggctgcttc |
| 11281 | tcacatcttt | tcctatcttt | ccttcctgct | attctccttc | agttctacag | cgagtcgggc |
| 11341 | atgcctacca | aacatctttc | agacagtgtg | tgtgctgtgt | gtgggcagca | gatctttgtg |
| 11401 | gacgtcagtg | aagaggggat | cattgagaac | acgtataggc | tgtcctgcaa | tcatgtgtat |
| 11461 | cctgcctcga | gctcctgggc | cacatctctc | ctgcaatctg | cacactgtag | tgagagagag |
| 11521 | aaagagggtg | gtcatgaccc | taggcatgct | gtccagaccc | ttgagtgtag | gagagccaca |
| 11581 | agagggccac | cttccctacc | ctttcccaca | gatcagagcc | actcttaggt | aaacagtggt |
| 11641 | tacaacctgg | ctgggtctga | gaggaacctg | aggctgcagc | tagtgaggct | gtgctagcag |
| 11701 | acctgagatc | tgaccagtca | caggggaaga | ggaccctcta | atgggatccc | tcagtttagc |
| 11761 | atcatcctct | gttctgaata | acacttgtaa | tatttatcat | gtatttaccc | agctcccatt |
| 11821 | ctctgcctat | gttgggaaag | ccatgtattg | tctccatttt | gccccataac | agtcttgtga |
| 11881 | gatagggatc | attatcctta | cttcacatgt | gaggaaacag | gttcagacac | agggacttgc |
| 11941 | ccaacattac | agagctgata | aagagcgaag | gcaggatttg | aacctttcaa | agactgtctg |
| 12001 | gggctggagt | gccgccctgg | ctctcaccat | ttcccttgac | cagcggtgct | cagcttccac |
| 12061 | gagttctgca | tccgtggctg | gtgcatcgtg | ggaaagaagc | aaacgtgtcc | ctactgcaaa |
| 12121 | gagaaggtag | acctcaagag | gatgttcagc | aatccgtatc | ctttattggg | gtcgttgttg |
| 12181 | ggagtgggct | gtgggaagaa | agtactggcc | agtgtgacct | gcatttgggt | cctcctgggg |
| 12241 | ccctcacttc | tgcccccaac | cagaacatgt | caaaccatgg | tgggaagctg | agctgctagt |
| 12301 | cctgccccca | tgatacaacc | ccagtttccc | tattctagga | ttattgccta | ttctcagcct |
| 12361 | ccttgcagcc | attgtcacgg | atagatagac | ttgtgtcagc | ctcaggctgt | gttatcttac |
| 12421 | actggcagtt | ccttcttaga | gaaggtgtta | caggaggccc | tccctgcatg | ttagtcatgg |
| 12481 | ggaactagga | tttatctcta | tacctctctc | agggctgccc | tgcctccagt | accagtcccc |
| 12541 | tctatctgcc | tcccaccttc | tctgcattca | gctctttacc | ccaacagaca | ggctgtgagg |
| 12601 | aggaagagga | gggggagggc | aaagttggga | gggctgcctg | agtaggaagt | gaggctgggc |
| 12661 | ccttccagaa | agcagcctcc | attcctctag | gctgtggagc | agctggaaag | tggggcagac |
| 12721 | ccagggagcc | ccaccaccca | tgctagatca | ctcctggcag | ctcttgcaca | gagtctcttt |
| 12781 | tctttaacac | actgacagct | gggagaggcc | tcacgtcatg | tatgggcaac | tgctggactg |
| 12841 | gcttcgatac | ttggtagcct | ggcagcctgt | catcattggt | gtagtccaag | gcatcaacta |
| 12901 | catcctgggc | ctggaatagt | gatgaagagc | atcagtggaa | aacccacccc | acacgccatg |
| 12961 | gacctcaggg | cactctcctc | cctgcccaca | aagacctcct | gggtgggaaa | gactcaaagg |
| 13021 | ggYgcttggg | ccactcagga | cccctcYggc | tgtgtcggac | tggggaggga | tatgatggag |
| 13081 | agccagccag | tggggctgtc | agcagtgggg | ggctttttaa | aagaaaacta | ttttgatgaa |
| 13141 | tatatttaaa | aaaccttttt | ttattgtgga | gcataggaat | tgcccccctc | caggcttcac |
| 13201 | cctccctgcc | taagcagggt | gggggcagag | ccatgacatt | tttggtttaa | aggagccttc |
| 13261 | tcatctctgg | ccgagaacac | tgctgggctc | ccaggtagct | gaaggcctca | gcccacccac |
| 13321 | tcccttcttc | cctgtgtggg | gctcaagcct | ggtgcactta | gtatagaaga | gctaacgtac |
| 13381 | tcaggcttgt | gccacgggtg | agcactgagg | ccccaggtgt | cctccctccc | ccactgtctg |
| 13441 | ggacacagga | caggtgttgc | gtctgactct | gtctccccct | gtccaagagc | tataggctgg |
| 13501 | ttgaggcaag | tggaacctta | tcagtgactt | ggccaacaag | ggaagccttg | gggcctcaga |
| 13561 | attcattgaa | Ratttgtttt | gggacaactg | gaagaatcag | caccatggat | actcgcccgt |
| 13621 | gggcagggct | gtggtcagcc | aagaatagag | gtcatatagt | tgggccatgg | ggcaattgtt |
| 13681 | ggcagccatg | actgacggcc | ccttgtgcaa | gctcattctt | cagtggatcc | ttcagtggag |
| 13741 | tggtgacacg | tgccagcggt | cactctgcca | catcacttcc | ttcttgaaag | cctaagagtg |
| 13801 | cgtatgcgtg | tgtgtgtgtg | tgtgtgtgtg | tacgtgaggc | agaagaatat | gacagatgtc |
| 13861 | agcttctccc | tgtgtcagat | gatatgtcct | tgaagctggc | aggggattcc | cagtccaggg |
| 13921 | aatatcccta | catgattttt | gtcattcatg | ggtcctccct | gggcctgaca | acgggagtgg |
| 13981 | tgggtgggtg | agaacaggtt | ctgagagggg | gcttctagga | aggccccagc | cctagtccta |
| 14041 | ggcgacttga | ataaagtggg | aggtcaaaca | tgggccttcg | gcattKggtt | tctagggaat |
| 14101 | atggctcagt | agggcctgcc | ccttcaaggg | cagcaagaac | gaagcaggat | gttgtcactc |
| 14161 | ccgtctgaat | aaagctccat | gagctgggtt | ggaaagctga | acatttatct | tgctttcttc |
| 14221 | ttcccacctc | tttccctggg | gtccccaggg | gtgtcttgcc | tttgttaacc | cccatcggag |
| 14281 | acctgagggt | ctgggggtgg | ttgggcctgc | ctttctgctg | ttcccagctg | ttccccWgct |
| 14341 | gacatcccta | ggagtggtgg | aatgccaggc | tcctgtcctg | tggcctgggg | gcctggggca |
| 14401 | tcattgggcc | tgccttcaga | ctgaggttgc | tctatgttct | cactgcctga | ggacagtgtc |
| 14461 | cYgccaccac | ctgccttcct | gaggaccaca | ctcaggctcg | gcttctcttc | cccagctRtg |
| 14521 | gcttcccatg | gtaccctgct | gcttatgcca | cctgtggggc | tgttcccctc | ctcagagagg |
| 14581 | ggaatggggc | tggtcagagg | acctagggat | cacccttcct | tttacttttt | ccccccaccc |
| 14641 | ccctgtcagg | ctcaggtgag | aagccgaggc | caggctgtcc | aaagctcttt | tcatRtgtaa |
| 14701 | cagttctgag | tcccttgacc | tccccccttg | gcctgactct | ggtctcggtt | ccactaagac |
| 14761 | agagtcctgt | catctttccc | taccatcccc | cactggactg | tctctctcag | aaaccccagg |
| 14821 | cagccttgcY | tcctgaccta | actcctggag | atgctggtgt | tcttgggagg | aatttctcct |
| 14881 | gcatcttaca | tgctagaagc | ccctggggca | ggaggtaggg | ggaggaattg | agaggaggaa |
| 14941 | aaacatgaac | tagacaccta | gagaagaagg | atgtgacttg | tagtatccta | tgtctaaatt |
| 15001 | aggaatatga | atctggtttt | tctacaagaa | gtttgagatc | acagctgact | gtgttcctga |
| 15061 | tgcatccacc | aaacccagtt | ccatctgtgg | gcctccctgg | ctctgtcacc | agccgttgca |
| 15121 | ccctcccaat | cacaggagtc | acaaacctca | gacatgcagc | tcctgtccac | acttaatata |
| 15181 | tgcatgcatt | ggatcaccca | gccctggtct | ttctgcctcc | atggataact | gcatgaccct |
| 15241 | gagagaaaac | ctccttagat | ttagcatcct | aggttcctca | cMcgcctcac | cctgaatcct |
| 15301 | ggccctcccg | cagccccagc | gccatttgtc | ccatcagtga | caagattcat | attctgatgt |
| 15361 | agactctgtt | gccagagcca | gtgttgagcc | agtccgcctc | ttccccggga | agtgcctgcc |
| 15421 | cttccctcct | gttagRgttg | gctctcgagc | ttgtgtgcca | gttcctgggt | tggccgtgag |
| 15481 | agttctacag | acaaggagga | agtgctctcg | gtgtatttcc | tgtggtgggt | tcacacgcag |
| 15541 | ctagacacag | ctaacttgag | tcttggagct | cctagaggga | agcttctgga | aaggaaggct |
| 15601 | cttcaggacc | tcttaggagc | caggtaggag | tctgggacta | ctagtgaacc | tagacctgtg |
| 15661 | gctctggcca | gaggggctag | gatgagagac | agagggtgtg | atggtgggtg | ctgggagatg |
| 15721 | tagccgacct | tggggctggt | ggctRggKga | gtgggtagcc | tgggaaaggc | caggatgtgg |
| 15781 | acggactggt | atggcaYtga | gcctgaagtg | gtccaacttg | gggttcccca | gtgcctagga |
| 15841 | aagttgtccc | cttgaatgtc | agtgtgaagg | tgaaggagga | agcagatgcc | tgttcatatg |
| 15901 | gaaacaaaga | cctggctgtg | aagaggggag | gcggacacca | aagtcctgac | acttgggcgg |
| 15961 | gacagaattg | atctgtgaga | gactcatcta | gttcataccc | taggtgaccc | tgggggtggc |
| 16021 | atgggggtag | attagMgatc | ccagtctggt | atcctctgga | gagtaggagt | cccaggagct |
| 16081 | gaaggtttct | ggccactgaa | ctttggctaa | agcagaggtg | tcacagctgc | tcaagattcc |
| 16141 | ctggttaaaa | agtgaaagtg | aaatagaggg | tcggggcagt | gctttcccag | aaggattgct |
| 16201 | cggcatcctg | cccttcccag | aagcagctct | ggtgctgaag | agagcactgc | ctccctgtgt |
| 16261 | gactgggtga | gtccatattc | tctctttggg | tctcaatttt | gccttcccta | atgaaggggt |
| 16321 | aagattggac | taggtaagca | tcttacaacc | atttgtggtc | atgagagctg | gggtggggaa |
| 16381 | ggattgtcac | ttgacccccc | cagctctgtt | tctaagtgct | gaaagagctc | caggctatgc |
| 16441 | tacgggagga | gaagccagct | actgaggaaa | agccagctac | tgagaaaaag | cgggagtggt |
| 16501 | ttaccattct | cctcccccac | ctttcaccag | agaagaggac | gttgtcacag | ataaagagcc |
| 16561 | aggctcacca | gctcctgacg | catgcatcat | gaccatgaga | cacaactgga | caccaggtag |
| 16621 | gccttggggc | tacgcatggg | caggcRgggt | agggtgaggt | ctatgaacag | aatggagcaa |
| 16681 | tgggctaacc | cggagccttc | actccaaggc | aaRccaccca | gcgcacctgg | tgctgttgct |
| 16741 | ttaagaacct | gggcagatat | tgtagctctg | gctccagtct | aaagcttctc | tgtactctgt |
| 16801 | tcaataaagg | gctaaggggt | gggtgctgag | gggtccctct | tcccgctctg | attccctgRc |
| 16861 | tagaacccag | acatctctgg | gctggagtta | catccttacc | cgggcagccc | actNtgtctc |
| 16921 | cagagccgct | gacctgtaac | tgtcctttcc | tcagacctca | gccctttgtg | ggtcctgctc |
| 16981 | ctgtgtgccc | acgtcgtcac | tctcctggtc | agagccacac | ctgtctcgca | gaccaccaca |
| 17041 | gctgccactg | cctcagttag | aagcacaaag | gacccctgcc | cctcccagcc | cccagtgttc |
| 17101 | ccagcagcta | agcagtgtcc | agcattggaa | gtgacctggc | cagaggtgga | agtgccactg |
| 17161 | agtaagaagc | acagtggtgg | agggtgggct | atgggcacag | aggttcccag | ggtcgggttg |
| 17221 | actcctgagc | gccagtcccc | ttctgcccat | gtaccaccag | ctgagccagc | tgggctgagc |
| 17281 | acgcaccatt | ctccctcccc | aacccagtgt | catgggtgca | ggcttggcgc | agctcccaag |
| 17341 | atgctcccta | tcaaatagga | cagagaactc | aagacataag | taatggtcac | aggacctccc |
| 17401 | agagccttgg | ttgcagtgga | cYccaaggcc | agcccctcca | cccagagcct | gctggcctct |
| 17461 | ggccatctca | gaggagcagc | agccatccag | cactgcctYt | gtcacctggg | ctcccaagtc |
| 17521 | accgaggctg | ggcactagaa | aaggtcatcc | tgaggagaca | ggttcagaag | aggattcatc |
| 17581 | acgtgaacca | aggaccattc | ctcacattcc | ccgtgtttag | ggctagggcc | tctcggagac |
| 17641 | aactgSactt | ctgtaacgga | cgttcccacc | taggtggtgt | Rcagagcagt | tctctaggtt |
| 17701 | ccagatgcat | ggggactggg | gggagctggc | agRgagggca | cagcagagca | gggtagggga |
| 17761 | agggcctgct | cttctgaaga | gctaactgct | gcctgtgtcc | ctagatggaa | cgctgagctt |
| 17821 | atcctgtgtg | gcctgcagcc | Rcttccccaa | cttcagcatc | ctctactggc | tgggcaatgg |
| 17881 | ttccttcatt | gagcacctcc | caggccgact | gtgggagggg | agcaccaggt | gagggtcgca |
| 17941 | gcagccaggt | gggtgggaag | gaRgccttct | gcggccttct | catgaccttt | ccttcccttc |
| 18001 | cgctccagcc | Rggaacgtgg | gagcacaggt | acgcagctgt | gcaaggcctt | ggtgctggag |
| 18061 | cagctgaccc | ctgccctgca | cagcaccaac | ttctcctgtg | tgctcgtgga | ccctgaacag |
| 18121 | gttgtccagc | gtcacgtcgt | cctggcccag | ctctgggtga | ggagcccaag | gagaggcctc |
| 18181 | caggaacagg | aggagctctg | cttccatatg | tggggaggaa | agggtgggct | ctgccagWgc |
| 18241 | agcctgtgaa | ctaatgccca | gcattcctca | aggtcagcca | gacaaaaagg | aacttaggtc |
| 18301 | ttgggcagag | gaggtgtagc | ctggggcaaa | gtgatgagat | gtccctcctt | tccttggcct |
| 18361 | gatccttgtc | tgccttcact | tccctaggct | gggctgaggg | caaccttgcc | ccccacccaa |
| 18421 | gaagccctgc | cctccagcca | cagcagtcca | cagcagcagg | gttaagactc | agcacagggc |
| 18481 | cagcagcagc | acaaccttga | ccagagcttg | ggtcctacct | gtctacctgg | agtgaacagt |
| 18541 | ccctgactgc | ctgtaggctg | cgtggatgMg | caacacaccc | cctccttctc | tgctttgggt |
| 18601 | cccttctctc | accaaattca | aactccattc | ccacctacct | agaaaatcac | agcctcctta |
| 18661 | taatgcctcc | tYctcctgcc | attctctctc | cacctatcca | ttagccttcc | taacRtccta |
| 18721 | ctcctcacac | tgctctactg | ctcagaaacc | accaagactg | ttgatgcctt | agccttgcac |
| 18781 | tccagggccc | tacctgcatt | tcccacatga | ctttctggaa | gcctcccaac | tattcttgct |
| 18841 | tttcccagac | agctcccact | cccatgtctc | tgctcattta | gtcccgtctt | cctcaccgcc |
| 18901 | ccagcagggg | aacgctcaag | cctggtYgaa | atgctgcctc | ttcagtgaag | tcatcctctt |
| 18961 | tcagctctgg | ccgcattctg | cagacttcct | atcttcgtgc | tgtatgtttt | ttttttcccc |
| 19021 | cttcactcta | atggactgtt | ccagggaagg | gatgggggca | gcagctgctt | cggatccaca |
| 19081 | ctgtatctgt | gtcatcccca | catgggtcct | cataaaggat | tattcaatgg | aggcatcctg |
| 19141 | acatctgttc | atttaggctt | cagttccact | cccaggaact | ttgcctgtcc | cacgagggag |
| 19201 | tatgggagag | agggactgcc | acacagaagc | tgaagacaac | acctgcttca | ggggaacaca |
| 19261 | ggcgcNtgaa | aaagaaaaga | gagaacagcY | cataatgctc | cccgggagca | gaggccacta |
| 19321 | atggagagtg | ggaagagcct | ggaaagatgt | ggcctcagga | aaagggatga | gagaaaggag |
| 19381 | gtggtatgga | agactcagca | ggaacaaggt | aggcttcaaa | gagcctatat | tcctcttttt |
| 19441 | cccacaccga | tcaagKcaac | tcagtactca | cgggagaaaa | atagacttta | tttacaagta |
| 19501 | ataacattta | Raaaagatcc | atccccggcc | cttaaaaacc | ttcccatcac | tccaaatccc |
| 19561 | accccagtgc | aagtYtgggg | aaggtagggt | Rtgagctgct | gctgaaggct | gtcccccaac |
| 19621 | cccactcctg | agacaYaggg | cccatccgtc | ctgggaaaga | gcatcctctg | gcaggtgctc |
| 19681 | ccaccaggtc | agacccagtc | ctggacttca | agagtgaggg | cccctgctgg | gcccagccac |
| 19741 | caggacagca | ggaaccaggg | cctactcctY | ttatggtccc | ttctagatcc | agaggctaag |
| 19801 | aggaagactg | gccaggccca | aggacccagc | catcaaaacc | agcctcaaat | ctggttgtga |
| 19861 | tggagaagtg | actttgcttt | aagaaaaaag | gaggcaaggt | agggagagcg | cccacactgt |
| 19921 | ccatgctcca | ggccccctgg | gccagctccg | agaaggcgcc | agtgaaggac | cagggaccag |
| 19981 | gccagggtgc | gggcaggcat | cRctgtctct | aggggtttgg | ctactgttgg | cctgggagct |
| 20041 | gagagaaggc | actgagaggg | acagtaggcg | gaggaccagg | tgaSgKcagc | atcggggaca |
| 20101 | caggtggggc | cactcactgg | tactggccct | ttagtgcttt | gcctgaaaga | gacacagtca |
| 20161 | catggccaga | tgagaacttg | cgatactagc | ctgcacccac | tggctgggaa | gatctcttcc |
| 20221 | tgctcccacg | cccctgtctg | gatccYctcc | ctYgtgagcc | ccagggttat | cagttgctgg |
| 20281 | ctgtgcctga | gcagctctgR | gtgctctcca | tgagaatggg | gccatctgtc | ttctctcctt |
| 20341 | ggagaggagc | taccaggaca | gggacacctc | ttaccccaca | ccctccagca | gcctggcgtg |
| 20401 | gccccatctt | ggatgctact | tggtggggcg | gtctgggggg | tgcccatgct | ctcatcgggt |
| 20461 | ttccctcccc | catcctgcca | gtgcctctac | cttgcccttg | gctcgagggg | tggcaccaat |
| 20521 | ggcggcagca | gtggcggcRc | tggctgtggt | ggtggcaatg | cgcggagaac | ggcgggttcc |
| 20581 | actgcgagtg | ttgggggaag | ccttggacag | ggccttcttt | gaggctcccc | gccgcagaag |
| 20641 | gctgttccct | agcttcttgg | gtgtgttgag | gatgctgaag | gYcatcgact | ggcgccggtc |
| 20701 | agcctgcaag | gaagggctgt | cagaccggga | gacccaatgc | tgccttccca | ggccagcgtg |
| 20761 | ctgtgccacg | ctStaYcagc | aaggtcccgc | cagggcgtcg | cttcatcccc | cttcagcccc |
| 20821 | agcctcacct | gtttagtaga | agctggagct | gctttcttct | gggcctcagt | agtgctctgt |
| 20881 | ttgcgccctt | catgtcggtc | tcgKggagtc | atggggcRtg | ggaaacagct | ggtggccttc |
| 20941 | ttagactatg | gagaagagga | cagttaggca | gacagtaRca | agaggagtca | catctgaagc |
| 21001 | caggtgtctt | gtcctctcag | agctgagtgg | accttgtaag | tcaacgtgca | acctgctccc |
| 21061 | cttcccaact | ctgggccaga | tccttccctt | cccaacagtt | cccatccatg | ggtcaggccc |
| 21121 | ttggagagag | ggaaagagag | ggggaagtga | gggaaggaga | gagaaggctc | cctttagtcc |
| 21181 | ttggtgagct | gggcctgacc | tgagcacagt | gctggagtaa | cacccaggag | ccaccgcgcc |
| 21241 | tacctcagga | gttccagggc | cctggtggKg | ctctagggag | acccgtttgc | gctgctgccg |
| 21301 | ggtggtgatg | ccagtgccct | cggctatctg | gattggctgc | atgctggctc | ggcRcagggt |
| 21361 | ctcttggggg | tctccagttt | tcatctcctc | atctgtgatg | gtgcccaggc | tcagggaagg |
| 21421 | ctgcatgggt | ggaagaggtg | gtcagtggac | catagctgta | tggagatgga | ggaggacctg |
| 21481 | gggctgtYcc | agaactctac | actcgcccga | cacttatggt | cgggaccctt | cctgcctcac |
| 21541 | gaggtagaaa | gacacaaggc | ctcctttcct | gttctgcttt | ctacctaagc | cctgggcaaa |
| 21601 | tggccacaag | cagtgcagtc | ctgaccagat | tcctctctga | gctcctgcct | accccMaggg |
| 21661 | acttcacccc | tgagtgccct | cccagctgtc | tgttccacct | ggaaacatga | gaaggtcacc |
| 21721 | ctccccctcc | tcggccagtc | agtgatccag | ggccctagtg | ctcaggctag | atcagcaggt |
| 21781 | gggattccaa | ggRagggcag | ggatgggagg | ccctgcacag | tgaccccagg | cctcaccctg |
| 21841 | gactccaggg | gatagcaggt | cttcagatgt | ggggggcaca | ctcgattgcg | ctgctgcagc |
| 21901 | tctgcaatgc | ggttccagtc | atccagctgc | tcaggctcat | cctggcaagt | gcccatgtag |
| 21961 | aagctgttcc | ttcctgtgga | aggcagggaa | gtgggaacaa | atgagcctgg | agtcggcagg |
| 22021 | tcacctcctg | gccctggcat | cttgccagcc | tttgctgcca | cctaccccat | aaacttgaag |
| 22081 | cccRgcacac | cagtctgatt | cagtgccgca | ggtgcaggag | tacggcacac | agactatttc |
| 22141 | tatcctaggg | gcttgctcac | caccttctcc | ctggagaggg | cagaagaggt | cacacgcaga |
| 22201 | gactgctact | acatcttaYt | cacctgccaa | ggcttggtgg | ccaacaccca | gaggaacaaa |
| 22261 | ttaaggaccg | ggaattaatt | cccaggggct | ccctggtgcc | caaaggacaa | gagcttccaa |
| 22321 | gaagagtctg | gccagcctgg | cctttccagc | agcccatcac | cgcctgagaa | gggcatggag |
| 22381 | gactccccac | agctaagtgt | cacaattgtg | ctgggaatcc | cgggccctta | actctggcta |
| 22441 | agagtgcccc | caacacagcc | agcccctaga | tgggcaggta | aggaaggccc | tgaggctgca |
| 22501 | ggaaggaggg | gcaggtggag | ctggatggta | gcaaggaggc | cagccttgga | tttttaaaaa |
| 22561 | gctttcctct | tttccctgtg | ccacgatcca | ccttccagtc | taattttggg | gtatagtaag |
| 22621 | tccctgtagt | cccctcacct | ggaggggccc | cactggacac | cccggcctgg | gaacgacgag |
| 22681 | cagaactgcg | agtggtgggg | cggtagccag | gcaagctgag | cagggctgag | ttgccataat |
| 22741 | cgggagaacc | caggcgagct | agagactgag | tagaggaggt | ggctcgcagg | ctagcctggg |
| 22801 | aagcaggagc | agacMgcgtg | ctgtagaacg | atgagttggc | gctgtctggc | tcttccaYat |
| 22861 | ctagcttctg | gaagacagag | tgaatctgtt | gcagYgtaca | gtccctggca | ctgtacagaa |
| 22921 | gcttcccatt | cccttccgaa | gccctcagat | cccacggcac | atccatgtat | tcccaactgc |
| 22981 | tttgcaaagg | tccttaaagt | gtgtgtctgc | aagaaatggg | ccttgtcgac | agaagccctc |
| 23041 | acaaggtggt | gctgatgttg | tcaagactct | tctacgcatt | tttttcatgg | agtctattca |
| 23101 | taatgctttg | aggtagggaa | tgcagagtgt | ttatcggccc | attttggaga | tgaagtgcaa |
| 23161 | agaaataaag | tgactagccc | caaatcacac | tgctaggaag | tatcagagct | ggggctaggc |
| 23221 | cccatgtctc | ctgactagtc | aggctcatcc | cacagcctct | gctgtccctc | agtccaaact |
| 23281 | tccagggccc | ttaccatgtt | ccagaacttc | cccaacttct | tggtagcagg | gggcacccta |
| 23341 | aacacacagg | tcccccctgc | tgtaccaggg | gcccctctcc | cctcctccca | aacctcccct |
| 23401 | tcaagatgtg | gaaacaaagg | caagggcctg | Yagcctgtca | ggcagtccac | tgggcagcaa |
| 23461 | caatgcctct | cagctgcatg | gggcatgctg | ggaggcacag | gatgggctgc | agcttcgcca |
| 23521 | cgttctctcc | cttcaccctg | cacaggctca | gtgctacgca | tggagagaat | gctagcctta |
| 23581 | gtcaggaggc | agggatctaa | tcctagccct | gcctttttct | tcagaagtgc | ccttaaccaa |
| 23641 | gtcactgccc | tttttaagac | ctctcagctt | tcccactgta | acatggactg | gctgctcatc |
| 23701 | cctccctgct | cctgactgag | tgcccagtgc | aaagatgccc | ttgagaggaa | gtgggaattg |
| 23761 | ctgccctgca | gcccctgtcc | cagcagcctg | accttggtca | tggtgatgtt | gatgatctgc |
| 23821 | gtggtgcgcc | gacgagcgga | gcgggtctta | cgacccgagt | ccaggaagac | gtctcccagg |
| 23881 | gagtccaggc | tgctctccag | gggggcctga | ctccgagcag | ggatgggagt | gaagtagaga |
| 23941 | ctctccaggg | attctacctt | ggggggcRgg | cgctgggaga | taggtgaggc | tggttctcca |
| 24001 | gggacgctgg | tgccgtctgg | ctgggtacga | ggcagcttgc | tatggaaagg | aaacctgctg |
| 24061 | aggtacagtc | cttcacgcta | gaaggcattt | tgtccagccc | tttttgaaag | tgaccatttc |
| 24121 | ccatccttac | tacaagcaga | tgaggtcaag | cagcccatct | ctctgatttt | tcagaggtac |
| 24181 | caaggaaagc | acttgacctg | ggccttcctt | tcagtccact | cccctggctt | ctcctaatag |
| 24241 | ctcctcatag | tggcaatgcc | cagacccaga | tgtcccatcc | ccaccagatg | cccatggctg |
| 24301 | cttcacagca | aacacgtccc | aatctaagcc | cacttctctg | ttcttcctcc | tgcatctccc |
| 24361 | atttcagtga | ataggaacgc | cccccactca | ggcccccaag | ccatgaacgt | gggcataatc |
| 24421 | caatgtcgtc | ctgcttggcg | agcccaatca | ccaagcttcc | tgaacagcWM | ctaaccacac |
| 24481 | cccactccat | gctcatgtcc | tttccctggt | ctgcttcatc | tcctctcacc | tagactcatc |
| 24541 | atggcactga | cagaggaaga | tgagtggtga | caagccaaga | actcaggcca | ggctgcccag |
| 24601 | ggtcaaaccc | cagctctacc | actggggaac | cttgggcaag | tgactgcccc | tctatgcccc |
| 24661 | agattcatct | gttaaaggag | acagaataaa | cctacctcag | agggttgttg | ggggacaaat |
| 24721 | caggtataat | tgtcatgagt | gctttatgtc | tagcacaaaa | taagtaaatg | taagtgttta |
| 24781 | ataaaaacat | ttttccagtc | ttaacttcta | tactagctat | tagaataatc | tttttaagat |
| 24841 | gcaaattaac | caYgtactct | tcagtttcaa | attcttccaa | ggttcctttt | tttttctcct |
| 24901 | aaacctttca | attacagcca | ccaaggtttc | ctcaatgcct | ttaggatcaa | gtcttaatag |
| 24961 | Ycggtctcca | atgggccttc | ctggcctcac | atctcagctt | agtcaggctc | tttcacagcc |
| 25021 | tctgttcaca | ctgctcttct | cgtcaacctg | gcacacacac | ctatggatgc | tttcaagact |
| 25081 | cagcaggagc | gatagcttcc | acgaagcctt | tcttgaccac | ttgcttttta | ttccaactgt |
| 25141 | gccctaaata | gatatctggt | ataatacccg | tttttcKtta | ttcttctcta | agaataaatt |
| 25201 | tagatcacat | cttatttatc | tcactaggat | acagcctgat | aaacagcagg | cactccataa |
| 25261 | acagacatag | ggaggaaggc | tgcctcctga | cctggtgata | ctgagtgggg | tcccctcctc |
| 25321 | gcagctcaga | tccaggctgt | caatactcaa | gtccagctgg | ggcttagcct | ggggctcacg |
| 25381 | gctctttaaa | gcatcagttg | ccacctggaa | tttgcccagg | tctcgaagct | gctggtctgc |
| 25441 | atgggcaacc | tgagaaggag | agggccaggg | ggagagtgaa | gaaaagccta | aggcagcagt |
| 25501 | ggcctaggag | gagagggcac | aggggtccag | tggaatagga | gtgaggtgag | tctgccagcc |
| 25561 | aaattcttac | ctgtgcctcc | aggctgcgca | cctgggcagt | aaggtggcgg | caggtctgtt |
| 25621 | cagcctcctt | ggtcttcagc | ccagcctgct | gtagctcatg | gcccagccgt | tcagcttcag |
| 25681 | ctcgcagctc | tttgttttcc | ttctgcagct | gctccaggct | ccgcagctgc | tcctgcagct |
| 25741 | cttggttctg | ctgcttcttg | gcatcataat | gtgttttggc | tttctccatc | tgtgggcaga |
| 25801 | gagggtgggt | gggtggggta | gaggttgaag | ggcaggagga | aggtggcatg | ggctggggct |
| 25861 | gggctcctta | cctgcagctt | atagtgctca | gctgcctgct | ccttctggct | caactgggct |
| 25921 | tgcagttcat | tcagctgggc | ctggaggcgc | tgggcctcct | gctggctctc | gcctccctga |
| 25981 | gcctggacag | cctgagaaga | aaggccactc | aggaaagctg | gtctggccgc | tctacccaag |
| 26041 | tccgcttatc | tgcaccagcc | actggggctc | cacaggtgct | tcagactcct | gcactttctt |
| 26101 | aggaagcgga | agaaaaccac | accaccccaa | atactctctg | cccgactaca | gtctactaaa |
| 26161 | cctgaagccc | acaYgccctt | cagtccacat | ccgtagtggc | ctttccctga | ccagctcctg |
| 26221 | ccctatcttt | gccttctttg | agaccagaca | caaagtgtca | caccctcttt | gcatgcacaa |
| 26281 | tctcccgtag | gaggaaggga | accaatcctc | agggaacacc | caggtgcaga | gccNtaSWSt |
| 26341 | aaggcacttg | gcatgtgagc | tctcttagga | caggggaact | tgtttctcct | caaagccact |
| 26401 | ctgagaagtc | acttcaccct | cttttcagag | gaggaaactg | agttcagaga | tttaagcaaa |
| 26461 | ttgaccagag | taacagtgac | taaatggcag | agtaagattt | ggtccaccta | actccaaaag |
| 26521 | cccatggggg | cttatttatg | atgcccacac | tgcctcctgt | ccagaccata | actccttaag |
| 26581 | agcagggcct | gattctctgt | ccatctgcaa | ggccaacaag | tgctttgctg | tagatagaag |
| 26641 | catcccccct | ttgcctctcc | taacatagga | caggccccac | aaggagtaga | ataaacattt |
| 26701 | gtttattgca | atcaagacat | gctgtggcac | catggtatga | aggtgagcag | gagaaatgaa |
| 26761 | gctctgagct | cccaacaact | cctaggagcc | accagggctt | tagtgagtcc | caatgccact |
| 26821 | ggtgcccaat | tcctttgccc | ctgactgaag | gctgtgaagc | ctagaactgc | aaaaagcaag |
| 26881 | tattaaacca | aagaaggtga | cacagttgaa | agcattaaga | atgttattaa | actgcactgt |
| 26941 | aatattcaac | actggtgaca | ctctYgttct | ttccctgccc | agactatcta | gacttacatt |
| 27001 | gtccaaaaga | actttatgca | atggtggaat | gttctgtatc | tgcgctgtcc | aatacagcag |
| 27061 | ccactaacca | catgtagcta | ctgaacaggg | gcacagtgta | gctagtgtga | ttgaagaact |
| 27121 | ggatttactt | taataaattt | caataaccac | acgtgactag | tagctgctga | agtggacagt |
| 27181 | gacagttgag | agatgggaac | caccctggtt | gtctctcgag | agctcccaga | agacacatgc |
| 27241 | aggggcttct | aagccacagg | cttcctagga | gggctacStg | gaatgcaggg | tgcccctctt |
| 27301 | ctgccccgac | accccccacg | gccccagagc | ttagagaata | gcttccctcc | cttgtccaga |
| 27361 | ggccagaccc | attcccccag | ctgccccacc | ttcagcttct | gctgctgcac | cttgctggct |
| 27421 | tggtcagagt | cagccagttt | cttactcagt | tcttccacct | ggggagggaa | gaggaggaca |
| 27481 | gaagactcag | gaggacttcc | cctggatgtt | catcctggat | gtccacccat | catggggttt |
| 27541 | cccagaccag | gatccccagt | gttcctagaa | taaactcagg | ccctttctct | ggcctccaat |
| 27601 | tacggaacag | cctgctgccc | aggctgcttg | gcagggcctg | aatgaggcaa | cctaacacat |
| 27661 | agatgttgcc | agggccaact | gttcttgcgt | ctaccctgag | cctgcagaga | cagaggcctg |
| 27721 | cccaaccccc | gtcacctcca | aaatcaggag | aattgactct | ggggagccga | cacctcacca |
| 27781 | ccaccttgct | gccgccacac | tctgcagccg | caaccttccc | aggacctagt | ctgtaattct |
| 27841 | agtagacata | ctcaatgaat | tcccatgcct | ccctcccaga | aactgccaaa | gcccaagccc |
| 27901 | acagatgctc | agacctcttc | ccaacatcca | caggccgtta | gggctggtgc | tagcagcatg |
| 27961 | gctgctgtgg | ttagcattgg | ggaacagatt | gctggaagac | aagagcaggg | gcagcacatg |
| 28021 | tactccaaag | cccaccccac | tYctacaaag | aggaagagca | cagggagtag | gggaaaagag |
| 28081 | agaacataac | agccccatgc | acccttggct | gctccaagca | ttctgggagt | tcaagcatga |
| 28141 | ccaggcagca | caggggagag | gcaagggctc | cattgctaac | tgtttgctat | tcactttgat |
| 28201 | tgtcccccac | tatcacaggc | tccttagagg | agggcccaat | ttttcagcag | ccctggggtg |
| 28261 | gctgggtagg | agagtgatgg | agaaagggtg | ctctatagcc | tcgatgtctc | agaaacacca |
| 28321 | gctctatagc | ctcgatgtct | caggcaacac | agagatgatt | cccatgagaa | agaggcagcc |
| 28381 | agaccatgtg | acccccactc | ccccgccccc | atctggtata | gacccctcct | gctccttcac |
| 28441 | cctcggtctt | cctgctacag | acatctctat | gctgtgctcg | gggttagagc | cccagaaagt |
| 28501 | gatgggcaag | tgtcctaagM | ccacaatcct | ccMtaacctg | tgggggctgc | ctcgcatatc |
| 28561 | accttcaagg | cttccataaa | gctgtactct | gggaaaaagg | gacaccatgt | taaacaaggc |
| 28621 | cgacacggta | attctgctgt | tcctcttagt | cgggtatcct | taactagaca | cagtacttgg |
| 28681 | gaagttctcg | aatcccaagg | attgtgtctg | tcattggttc | agggtgggaa | agatgaagcc |
| 28741 | agtgctaccc | cttgtccctg | ataRgcaaat | gagagaaggt | gcagaagggt | ggagaggccg |
| 28801 | acctgggatg | ggtgggatga | ggcctgagag | agcccagcac | accacactcc | tgggcagcct |
| 28861 | gggcctggat | tccatggctt | gaccctgccc | ccttcacaaa | cagttcacaa | caggagctgg |
| 28921 | cggaggcaag | ctgcagccgg | gctcatgcac | caagactggt | caccgtttaa | gcagccagca |
| 28981 | tttagcgagg | acctcaggca | ttacctgctt | agtttgctct | ctctgaaata | cctctagctg |
| 29041 | ctccacctgt | acatggggga | ggagcaacag | agacagagtg | agatgaggcc | aaagaagcac |
| 29101 | cagccctgct | gccaggctga | cctcactgag | gctctgatac | tttcccctaa | ggagctagat |
| 29161 | tgacagtaag | tttaaaaatg | ccagttaggc | tgattctaat | ccccagtggc | tcctgaggca |
| 29221 | tccagtgcag | gtgtgcctct | gaacaggctg | gtggtcatca | caacttgact | ctctagtgac |
| 29281 | agagccttca | ggggagggga | ggccactgac | attttcttta | ggatgacagg | ggcaacagac |
| 29341 | ttgaactcca | ccagccacct | ctccttttct | gccacccagt | gaatgaggaa | aggcaagaca |
| 29401 | ctccagtgta | ggagctagag | gccctggaca | cagaggatcg | atgtccccgc | gctctcagct |
| 29461 | cctgatcttt | gggagggtgg | ttgggctgag | taccttacct | gggcagtgag | tttctgcctc |
| 29521 | tcttcctgga | accgctgcct | ctcctccagg | accttgacct | tggcaccctc | atacttggca |
| 29581 | gtcatcacct | ccagctcccg | ggcagtgctc | tgtgcttctc | gctgcacctc | agccagacgg |
| 29641 | gtctcagcat | cagcacgtac | ggctgccaac | tcttggacat | acttYtcccg | ggcctggtcc |
| 29701 | aactccactt | ccagaaactg | ccggccaagg | ttggcccgct | cacccagccc | ccggttctcc |
| 29761 | tctgccagca | ggccatgcgc | cttcttcagc | atgctcagct | gctctgcata | gctggccttc |
| 29821 | tctgcccgca | gctgctgagc | tgttcgctcc | tgctctgcca | ccttctgccg | cagaggaatc |
| 29881 | agctccccaa | gctcccgctg | ggcccgcagc | agctctgccc | gcagtccccc | agcggcctgc |
| 29941 | ttgctctgct | ccagctcctc | acggtggcgt | ttctcggcag | cggcctgctc | ggcctgcagc |
| 30001 | tgctggcaga | ggtgcttagc | tggcagcagc | tcactcacca | gggcctgtgt | gctggtgtgc |
| 30061 | tcgagctgca | gggtggagag | ggcctgctct | ttctggaaga | acttctcctg | ccacgccttc |
| 30121 | aattcttggc | ccagctcctc | cgcacgctca | gcctgtgagg | tcagctcctg | ccgcaggttc |
| 30181 | tctgaagcca | cccgctgttt | ctcagcctcc | tcccggaggc | tctgcacctc | ctcccgcaga |
| 30241 | gcagagctgc | gttctgcagc | tctggcactg | ttgctggctg | tctctgcctg | cagcaggcgc |
| 30301 | agcctctcct | ccagcttctg | gctcttctct | gactcggcca | tcaccagccg | cttcaactcc |
| 30361 | ttgctctccc | cctccttctc | caggacctgg | cgattcagga | tggacacctc | ctcctccaag |
| 30421 | ctgctgatga | ggctattttt | cctctcagcc | tcttgccggc | cccgggccac | ctgggccttc |
| 30481 | cactcatctt | cagccttgct | gtggtcttgt | accttggtgc | ggaaggcagc | caactcccgt |
| 30541 | tgggccgagg | ctaaggcact | ctgactgtgc | cctagctcct | gggccttctc | ctctaactgg |
| 30601 | ccctgcagag | tctccagagc | actgtcccgc | tcagcccggg | aggcccgctc | agcctcgagg |
| 30661 | ctgcgttcca | ggctgtcagc | ctgctcctgc | tgcttctggc | attgctgttc | cagcttgctc |
| 30721 | acctctgccc | gcagtgcYtc | cagcttgggg | cctgttggct | ctgtcctgcc | agcagcctca |
| 30781 | gattgggctc | ctgagccaga | tgcgtgctcc | ttttctttct | tagccagctg | ttccttcagt |
| 30841 | tgcttcacgg | tttgccgaag | ttcctccagc | tcttttatct | gggctgcctc | cagaccacga |
| 30901 | agcttggcca | actcctggtc | cttgccttcc | ttttccgtca | gggcatgagc | cagtgcctct |
| 30961 | tgcagggtag | cgaactccac | acgctgctcg | ttgagggcgt | tctgcagccg | catctcaagc |
| 31021 | tctgctctgg | ccgccttctc | cagggcaagg | tcagcctggg | cacggccccg | ctcctgggtc |
| 31081 | agccgcgcca | cctccctttc | ctgctgccca | cgctcctcct | gctgctgccc | ctggctctcc |
| 31141 | atcagcgcgg | cccgcagccg | ttccagctca | ttgcYcatct | gctctgcctc | ccgctccata |
| 31201 | gcctgcagcg | ctgcctgtgt | gctgcagaac | tggcgtccct | gttgctcttc | cagccactcg |
| 31261 | ggctgtctgt | ctcctgccct | cgcaggctcc | ttgactaact | cccgggaggc | tgtttcctgc |
| 31321 | tgctcacctg | ccttgcgcac | caaggtctcc | aagcgggcca | cctctttgct | ggtggcagcc |
| 31381 | atcttttcct | gcagagtgga | gaggtcatct | gcaagcttct | gggccctgac | ttccttctct |
| 31441 | tggacctgct | ggagtgctct | ggccaggttg | gcatggagct | cagctagttY | gttctgctgc |
| 31501 | cggcttatct | ggagctcgct | gtgggattct | atgcctgcca | ccttctcctt | tgcctcctgc |
| 31561 | agctcctggc | gggccttctc | acattcctcc | ttcaaagtca | tcagctgttc | ctggaacatg |
| 31621 | gcgccatact | gtgcctcctc | ttgctggcta | tcctcatacc | gctcacgcca | ggcagctact |
| 31681 | tctttgacga | gctgctcaca | ctcactctca | gctgtgtgct | gggcaSccat | ggcctctgcc |
| 31741 | agctcccgcc | gcaggacttc | agtctcagcY | tgatgggcct | ccccaagctg | cWgtaatcga |
| 31801 | gcctccagcc | ccttgcgccc | agccctctct | tcttccagct | cctttcgttc | ccgcttatgc |
| 31861 | tgctccacca | ggcttcgggt | ctctgccttc | agctcagaga | tacaacgctg | ctgctcttcc |
| 31921 | agggcatctg | cagccctgcg | cttctcctct | tcaaggctgc | ccttggtgac | cttcaaggac |
| 31981 | tctttgaggg | cctggagctg | ctcctggagc | tggtccttct | cctgggccac | cctttctttc |
| 32041 | tcagttgctt | tttgctgctc | agaccgcagc | tgcaactcta | gctctgcaac | ctgggcctgg |
| 32101 | gcctcatgct | gttcctggcg | ggctgtctca | acacaggcct | ggagttcctc | caccttccgg |
| 32161 | ctcagctctg | ccttctcccg | ctgggcctgt | gtcactgagg | tctgggcact | gtcccgggct |
| 32221 | tcattagcca | cctgaagttg | ctgctgcaga | atctccagct | tggcagcctt | ctccttctcc |
| 32281 | agtgcctcca | gctgcttgag | agccgcatcc | cgctccctta | aggaggcctc | tcgctcctct |
| 32341 | gcagcagtgg | ccagttgctg | ggcatggtcc | tgcctagttg | cctcctgctt | ctccgctacc |
| 32401 | tccttcaact | gctgctcctt | ctgcttcagg | ctactgctta | gctgctccac | ctggtggcgg |
| 32461 | aggccctggg | aggcctgttc | ttgctgttgg | agggtctgtg | ctagctgggc | ctgcttctct |
| 32521 | ttggcctgct | gcttcaggcc | agccagttct | tgatcctgtt | gctggatggt | ggcattgagt |
| 32581 | gtggtgagct | cagaggtcag | agaggccacc | tgggcagtca | accgggcccc | atgagcctgg |
| 32641 | gaggcctgct | ccagctcttc | cttggcctgg | ctgaggttgg | agatggagct | ctgcaggtca |
| 32701 | gtgatcaggc | tagacagctg | ctgcttttct | tcttcgaagt | ggccccgctc | agcaagcagc |
| 32761 | ttggcttcct | gctggcctcg | ctcagtctcc | agcatctcta | ccctggcttg | gagctgtgtg |
| 32821 | ttgtttgcag | caagagtggc | tgcctcttgc | ttcaaggttt | ccagctggtg | gtataaagag |
| 32881 | acaaactggg | atcagcatga | ctcctcagtc | atcaagactc | ctctggaaat | ggaggaacac |
| 32941 | caggaaccca | aatgtactga | atgtgagtcc | acaccaaccM | gcagcacaca | ggtctttctg |
| 33001 | tgcattccta | cctgcaagac | atcacccagc | acctcgccct | tctcctgggg | tgggttatcc |
| 33061 | tgcagctggg | acaagtgttc | ttccagctgt | gaaagttttc | cctgaaggat | ttcgttcttc |
| 33121 | tcttcaaggc | atttctggga | gtaaatgaga | cccatgtgaa | cagagagggg | gaacaggcac |
| 33181 | cagattacca | cacaagccct | cataaacatc | agcaaacatg | gggcccatca | tcttgttacc |
| 33241 | aagatctcct | tttgccctgg | cctagaaaaa | agcagaaacc | atggaactgg | gagcatgagg |
| 33301 | gacctgattc | tctagaccta | gttctaaggc | acaataaagt | cataatgtaa | cctgcttact |
| 33361 | acttccccaa | ggctgctgag | tttacttcaa | atttcctYac | cgtataccct | tcctcagata |
| 33421 | agtcttgagt | cctagattat | ccaaatcacc | accagctgcc | caccatcctc | tgggcagcaa |
| 33481 | taccactggc | agcagctgca | gcaaccccca | gtcccaaacc | cacttcttca | ccactgttca |
| 33541 | ctaagcacct | acaataggct | atgctgggtt | catccctaaW | tttttttttt | tttttttttt |
| 33601 | ttttgagaca | gagtctcgct | ctatcgccta | ggctggagtg | cagtggcgag | atcttggctt |
| 33661 | actgcaacct | ccacctccca | gattcgagag | cttcttctgt | ctcagcctcc | cgagtagctg |
| 33721 | ggactacagg | catgcatcac | cacacccagc | ttatgtggga | ggcagctact | accattcctc |
| 33781 | ttacagagca | agaacctgaa | gcagatgcta | agtgccttga | tcaagggcta | catggttatt |
| 33841 | agtaagtggc | caaattgggt | tcttaccaat | agtaacaatc | acaactggtt | cactgagagc |
| 33901 | ttactttaca | ctacacgatg | tgtgaagtgc | tttacatacg | ttttctcata | ataggtgatg |
| 33961 | aggcagctac | tcgttactac | tcccatttta | gggaaaggat | gcttagaaaa | acagactgat |
| 34021 | taacttgtcc | aagatccaca | tcttgtgaac | agcagagata | ggattgaaag | gtgtactata |
| 34081 | aagtgagggc | attgactggg | gaaaaaaaaa | ataagttaaa | aaaaaaaggt | gtactagact |
| 34141 | gaagcccaca | atctttcaat | tacagcacac | tattgaacct | tgaagagaaa | gcaacttaat |
| 34201 | acccaaaggc | ccagaagagc | acagtggtaa | actggactca | gctttgcaca | tgtggtcaag |
| 34261 | actgtggctg | tgaccccagc | agagggttac | cttgtcctgc | agggctgcgc | tgagctcctt |
| 34321 | ctccagctgg | gcctgcttct | ctagccactc | ctgagtggcc | ttgctgtgct | cctccgtcag |
| 34381 | ctcattgagg | gcatcctgta | gctgctgcag | atgactggca | aactcccgca | gctgagacgg |
| 34441 | gcaagtgaga | atccccatca | cccagaNNNN | NNgctgaccc | caccactgct | gtctgctccc |
| 34501 | agaaccccag | gggctggatg | cctccaatta | tcctgccaac | cctctacaaa | ccaatcacag |
| 34561 | ccatcacacc | tctaattcag | aactacaaat | caacatttag | ggtcacagcc | cagtacccgg |
| 34621 | gaagccgcca | attatgggat | aaggaaaggg | gcaaaatatg | caggtctctg | gagagactga |
| 34681 | agcataagac | aggtgctggg | acattcttct | caaccctctc | ttggggagcc | ttccagacca |
| 34741 | cctcagccct | gaggggcctc | catgcacaca | ccaccttaac | acccacctta | aaggaaaggt |
| 34801 | ctccattctc | ctccgaaagc | tggttgattt | tgcgatccat | ctggctcttc | tctgtcttca |
| 34861 | ggtcctggca | ctgcttcagg | gtttcatgca | gccgcatggt | aaggctgcga | gggagggaag |
| 34921 | cagtgagaag | agagtatggg | Ytcctggctg | ggtgagggga | ggggctgggg | cctgggaagg |
| 34981 | aatgcaggga | gagctgtacc | tctcattctt | gtcacgcagc | tcctcaagct | ccttgggctc |
| 35041 | cagtgggctg | gccgcctgct | tctcattcag | cagggctagg | cggtcaatgc | gctgctgcat |
| 35101 | catggctatc | tgtgcatctg | cccagagtgg | agggaggagg | agaggagaat | cagaactatg |
| 35161 | tgcatgagcg | gaactatgtg | cacagaacta | tgtgcacaag | gggaagggag | gagRcggcat |
| 35221 | agggaagagg | aggaatatgg | tatccaatct | aagggaaaga | gaagatgggg | acaaagacag |
| 35281 | aacctagctt | ccaggaggtc | agcctgacca | caggcccagg | gctgagctct | cagctccagg |
| 35341 | ggccagcaga | ggggacaaca | tgggaggcca | ggggacatcc | ttccggcaag | tctattcaca |
| 35401 | catctgccag | tgtgccagcc | acctaccctt | ctcggtgagg | agcttgcggt | tctcagctag |
| 35461 | ctccagctcc | agctcatccc | tattacttct | ctcatcagca | agctgcttct | tcagccgtct |
| 35521 | catctggaac | tgtggggtct | gcaggatatc | acccatggga | gaagctggag | aacctgagag |
| 35581 | aaagctgagg | agggagaagg | cccatatgca | ttggtaagcg | cctaagatSt | gaagcaatca |
| 35641 | gcaacaggca | gcagtaaggg | agcggggtct | atggaagtgc | gcactagcag | ctgggaggcc |
| 35701 | tgtgcacctg | ggttgtttgc | agtgctacct | caagcctcat | gacatgatct | tgggaaaact |
| 35761 | tttcttctca | ctgccttaat | ttctttgtca | gaaaaaaaaa | aagtgatata | ttctccttgg |
| 35821 | ctctgcagag | atgtgctaag | agaagagact | tcattgtagt | ctcYgaggaa | gaagggtatt |
| 35881 | ccataaacag | ggaacagctt | ttgagggagg | ccttctgcac | atgacaaatc | ccaaccactt |
| 35941 | cccccagtta | atactgggtg | aggtgaggag | atcccagatc | taccggatac | tctaagcact |
| 36001 | cccagaggct | ggttaacatc | ttaactctag | aagttaggaa | tgtgaggaat | ggatggatgc |
| 36061 | tgaggcccta | tcccaggagg | agaggcccag | aacatacttg | ttcccactgg | aagaggaggc |
| 36121 | aaccttctgt | agctctagga | agcgaatctc | cctcttggcc | tggtggctag | gtggggagag |
| 36181 | ctcttcaggg | aatgtgctag | aacaggtaga | aggcacagga | gctgggggta | agaaatagac |
| 36241 | aaaataaatc | aacaaaggtt | agtaagaagg | tgWaaagatt | tgcaccttta | tgcaatttga |
| 36301 | gaactcgcct | tagtgggagt | atatccatgg | atacttatat | gtaaactacc | aaggaaggca |
| 36361 | ctgggcagaa | cctgaaacct | ggtgcctggg | ttatccagag | ttccgtgtct | ctaaccaaaa |
| 36421 | tgaagtgcag | ggcttccatt | tctacagagc | atcattactc | agagcacagt | ggagtgacgg |
| 36481 | tgtcctctgg | ctcagaaact | gcaccaagtg | ctcaagcttt | ttcctcgagt | ccacactgca |
| 36541 | gagacggctt | ggggagccct | gagcaggatc | tccttgcagc | ccccaacaac | ctttcctatc |
| 36601 | agagccattg | gccaccattt | ggaattcatc | ccccctgaag | ccttgcacct | ccaaaatgcc |
| 36661 | ctcctcctca | aaacccttct | ctttccgtgg | tttccgtgac | cccttttgta | ggactctcct |
| 36721 | acctctaatc | acccattctt | aagtctcctc | atctgctcct | ccctcctcta | cccaccctct |
| 36781 | aagctcccag | agatctgatg | gggcctcttg | gctctgccca | tagtgcccac | ggcttcagtg |
| 36841 | gccatccaat | gctgacttgc | aaacctatct | tctggtccag | agcctgctcc | tgaattctgg |
| 36901 | actcacattt | ctaacatctc | cacctgaagg | tctcatgagg | aacctgaata | caaggaacat |
| 36961 | caaactcaac | ggctagaact | cgcctagacc | tccttcttac | attcctatca | tccaccagct |
| 37021 | gacctcttca | tcagaagacc | agcagaacga | tcactctttc | tactgtagta | ccagccgagg |
| 37081 | ccattgatat | attccgtact | tagattcctt | atcattattt | cctggtttat | gtatctgcct |
| 37141 | ttccacctag | aacatgcact | acatgacggg | aaaaacattt | tttaaaagac | tgtgggccgg |
| 37201 | gcgcagtggc | tcatgcctgt | attcctaaca | ctttgggagg | ccgaggcagg | tggatcacct |
| 37261 | gatgtcagga | gttcgagacc | Rgcctaatca | acatggtgaa | accccgtctc | tacaaaaaat |
| 37321 | acaaaaatta | gccaggtgtg | gtggcatgcg | cctgtaatcc | cagctactcg | ggaggctRag |
| 37381 | caggagaatt | gcttgaacac | gggaagtgga | gattgcagtg | agctgagatc | gcaccactac |
| 37441 | actccagcct | gggcgacaga | gagagactct | gtctcaaaaa | aaaataaaaa | taaaaataaa |
| 37501 | aagactgtat | tctcagcttc | taagcctaga | gtaatgattg | tttaaaaaat | aaaaaacaaa |
| 37561 | agtaggtatg | atcacttgta | aatatcctac | ataactgctg | ccaggcagca | aggaggagct |
| 37621 | ccataggaac | tgagatgata | caacatggcc | cagaaatcga | cctactccat | tacacacact |
| 37681 | tttcctgagc | atcaactctg | ccttgtgttg | gggacagaaa | caaaccccca | ccatacttga |
| 37741 | caactcagga | tcctagtatt | ccccatttca | gagatgaggg | gattctcagg | agtgtgtacc |
| 37801 | tacttacctt | tctgtaggaa | gttctctagg | tcctcattaa | ggtttagccc | gtcctcatgg |
| 37861 | tccagcacaa | atttaagaat | gacagccaac | tcagcctggg | ccacagggag | aaaaagagca |
| 37921 | tcacttaggt | gttaggcctc | tgaagggatg | gctgccagga | gctccaccct | ggcagtgcca |
| 37981 | gtccccggct | ccctcatgcc | ctaggagcct | gctggatccc | attctccctc | tcagagctga |
| 38041 | ggtcctatga | cccagccaac | aacattcaac | tagagatatg | ttcaccccac | ttgtcccctt |
| 38101 | ccctcccacc | tcccctcaag | atgtaccgaa | gtcagagttc | ctgactgact | taactcctga |
| 38161 | ccacaagtga | agtgactgtt | aaggaaagta | acacaatcag | aaagttgctt | ttattgttat |
| 38221 | tgttgttaag | aaacaagatc | ttgctctgtc | acccaggctg | gagtacagtg | gcacaatcat |
| 38281 | agctcactat | aacctccaac | tcctggagtc | aactcctcct | cctcagctcc | ccaagtagct |
| 38341 | agaactaSag | acacacactg | ccacacccag | ctcatttttt | ttaaaaaaaa | tattttttgt |
| 38401 | tgagacaggg | tctcgctatg | ttacccaggc | tgatcttgaa | ctcctggcct | caagcaatcc |
| 38461 | tcctgtctcg | gcctcccaaa | gtgctgggac | tataggcgtg | agccaccacg | cccggccagg |
| 38521 | aagcttttat | atataactat | gttggcctct | tccagatgac | cctaccagag | gaaaggatga |
| 38581 | gataaatgaa | gtgaaagttc | tgtggggRaa | aaaaaacaca | cacacaNNga | aacacatata |
| 38641 | ggaacagaga | ataatttcta | cgtattatcc | taaaacacat | tacagttaaa | catatgcaca |
| 38701 | taaaaaagga | cttgaaagta | catcctttaa | aaagttagca | aactctggga | atgagtttat |
| 38761 | cggcaactgt | tatttcctcc | tgcatgcttt | tcaacgtttc | ccagactttc | tatgatgaat |
| 38821 | ggcaataatt | gctataactg | tatttttaaa | aagtccagta | tctgctgttc | aaagaaaaac |
| 38881 | aagtcaggtg | aggtgaagca | tgggctaggc | ctgctaggtg | gcatggaggc | acaagggctt |
| 38941 | acctgaattt | tatattcaaa | ctgttcccag | tccctgggac | ttttggagct | catggtagag |
| 39001 | tggtataaga | gcagcatggt | catctagaag | ccaaacagga | ggcagtcaMt | gagtggggct |
| 39061 | gtctctcttc | tcagtgYccc | cattctgggc | tgttctgggg | actctgagct | attccggtga |
| 39121 | ctcttctaaa | agtcctggaa | ttcagcaatc | ccaggccacc | atccttaaca | gctccaggaa |
| 39181 | acactttttt | tttttttttt | taattaagga | tagtgtacac | tgtacaaaaa | gctgagcgcc |
| 39241 | aagattcctg | catggctcaa | ttcctggact | catggaaccc | tgggtgtgaa | gctttaggta |
| 39301 | ccctctatag | gccagcaccc | agaaagagca | gagggaatga | cttaagactg | agctataata |
| 39361 | aaaatatggt | gatagccgaa | tgagacctga | tttctgccag | gtctccaccg | aggcccacag |
| 39421 | taatggtcta | gtaaaccatt | gtttgtttca | taatctctgt | cataagatca | tgggctccta |
| 39481 | gaatccttgg | gctaaattag | cctctgtctc | aagacaggtg | gctgcctggt | tctacctcca |
| 39541 | acgtactaga | gccccagaaa | taaagcaccc | atcatctccc | cttgggttaa | gagaaggccc |
| 39601 | tgcagggtcc | ctcaggtacc | atcaccccaa | ccctgccctg | cctccccagt | ctggtattcc |
| 39661 | ataggtacct | tcgccagttc | cagctctgat | ccctctagca | ccttctgtgc | agataccagg |
| 39721 | cattctgggg | aagagggatg | ttttcgattt | tctgcaatga | caacaacgYa | gaaaacaggg |
| 39781 | tgaacttcct | ggaaaccata | cctgagatcc | cagaacactg | aaatctgggg | agcagaatgg |
| 39841 | ctatctctgg | tggggctatg | agatgtaggc | ctccttactc | ctatggcctc | tttcccctgc |
| 39901 | cttacaattt | tccatctgaa | gtcagttcta | tcctgggtca | atccaagggc | tacagggata |
| 39961 | atggaagaag | aaagcagcct | cggaattcac | agcaactctg | ggtcatgatg | ttgcactctc |
| 40021 | ccacccactc | accaactctc | agcaccacag | aggaagagcc | cagagatgcc | aggtcacttt |
| 40081 | agaatcctgt | tccaactgag | gtcacagagt | aaacctatag | ctgagtcaga | aaaggacaac |
| 40141 | tagggatacg | tgactcttat | actgcccgag | ggtctgggct | caaattacta | acaccttact |
| 40201 | ttatctaaat | aaagcctcac | ctttcctata | attctctagg | ggtggagatg | gcagctagct |
| 40261 | ccccatgtca | aagacgagga | ctctgtggtc | taaggctgga | caaggggagg | ggaactgaaa |
| 40321 | agcactgtac | tagaagcttt | gcatgtgttc | ttatttaatc | cacccatcca | cttgaagagc |
| 40381 | agttatctcc | atattataga | tagggaacct | atgtccagaa | aggtcacaca | agcagtgagg |
| 40441 | ggggtcaaga | tcaaccttaa | tgtgcctctg | cccctacacc | tatcgcctaa | gcaattaatt |
| 40501 | caaagttatc | tgggaaaaac | agtttttctt | gcaagggaaa | gagactcatt | ctctNttctg |
| 40561 | tctccttgaa | gttcggggaa | acagaaactt | aaggtgctca | aagagttaaa | agtgacaggt |
| 40621 | cccaaaaagt | aaccttctgg | ctccacctag | atctccgaga | agggctctgg | gactgaaggg |
| 40681 | acactcttct | tacaccaact | gatgaaggca | tcacaagacc | caggggatct | gaaccagctg |
| 40741 | ttttcatctt | tgtgttaaag | agtggggagc | cttgaaattt | ttctcctcca | gacacccatg |
| 40801 | aactagttcc | tctggactct | ccaatcccac | gagctgagga | agcagcttct | tcatagctgg |
| 40861 | ataagaaagg | tgcttactct | gcagaaaact | gcacacaaag | tccagtctct | ctgacaccgg |
| 40921 | ctgcttcaag | atttgctgtc | cctcttcagt | gccatggcta | gaaaaagagc | aagtattagg |
| 40981 | accagagtat | tcagcaatct | ttgcctcctt | gctgctgcat | ttcatagtac | ctccccattc |
| 41041 | cttccagtct | tgatctctgc | tggatctgga | agagatccag | atcagatcct | ggaggcaggt |
| 41101 | gacagatacc | aggacaccat | ttatccagat | ggaactgtgt | ggtgggtggg | aagaggggac |
| 41161 | ttgaggcatg | gggttcttct | ggaaaagatg | gcactctgcc | accctatttg | caaacataaa |
| 41221 | aaagctctgt | ggaaaggggc | cgagaggaga | Yggaggcagc | acagatgaaY | gggaagctat |
| 41281 | attacaccat | ctggaatggc | tcaactctaa | actgtcagga | agcctggaga | acacacctag |
| 41341 | gttaagagtg | agagaagacc | atggggaggg | aaaaacatcc | aagaactgaa | agaacaggag |
| 41401 | gaaacaaggc | tctgaagtga | cagggtgaag | ttcccccact | aggctgaagg | ctgagatggc |
| 41461 | aaaagcctcc | cagaggagga | tcccagggac | tagagtgttg | tttgtttgtt | tgtttgtttg |
| 41521 | agacagaatc | tcgctctgtt | gcccaggctg | gagtgcagtg | gcacgatctc | ggctcactat |
| 41581 | aacctctgac | tcctgggttc | aagcaatcct | cctgcctcag | cctcccaagt | agctgggatt |
| 41641 | acaggcatgg | accaccacgc | ccggctaatt | tttgtatttt | tagtagagat | ggggtttcgc |
| 41701 | catgttggcc | aggctggtct | caaactcctg | acctccaccc | acctcagcct | ctcaaagtgc |
| 41761 | tgggattaca | ggctggagcc | actgcgccca | gctaggacta | gtattcttga | ttagtggttc |
| 41821 | ttgtctgtac | ttgcttaact | ggaagagcgg | gcagtgtgaa | gagagccatg | aggagaggga |
| 41881 | gacagcaggg | ggagctctca | cacagcccag | gaggctgagg | caggagaact | gcttcaaccc |
| 41941 | aagcgacaga | gattacagtg | agctgagatc | atgccactgc | actccagcct | gggcaacaga |
| 42001 | gcgagattct | gtctccaaaa | aaaaaaaaga | atactagtcc | ctgggatcct | gctctgggag |
| 42061 | gcYtttgcca | tctcagcctt | caacctagtg | ggggaacttc | gctggatccc | ctagctaact |
| 42121 | gcagttccat | tttcagaagc | agcaggtgaa | ataccacttc | aagttagaaa | gctgaattct |
| 42181 | ctaggctaca | gtgggagatc | ctgattagtg | ggccccttgc | ttctcagaat | ctacactcct |
| 42241 | agttcttagc | caactttctg | gagggcaggg | caggcccaga | accttccaat | gccagagaca |
| 42301 | tcctgcaagc | ataagcatca | tccaagccaa | gactatgagt | gtacctcccc | ccatacccca |
| 42361 | tgtgattaca | caggcttctt | ccaagtgaat | ccctcccaga | agcactctgt | ctggatagtt |
| 42421 | ggtctgagat | cagagactcc | tacaaagtct | tgaggagatg | ctaatctctt | acagactccc |
| 42481 | aaatgagcca | ttttccctac | ccacccacaa | tctggaatgt | tgtgactcct | tggctcagtg |
| 42541 | tagagcaata | tttacctcag | agtattccat | taaYtaaaat | aaaaagaggt | tctcaggtga |
| 42601 | aatgtttaaa | aaatgctggg | ttaaactgaa | cattttttat | agaagaagat | acaacatgca |
| 42661 | ttatttccta | aacctatttg | accacaaaac | ccttttcccc | caccccctac | aaagcctggt |
| 42721 | gtaagtaaag | ctgcatggag | catactttgg | acaacagtag | tcctagagaa | atccagccca |
| 42781 | tcctttaaga | ctgtgttgaa | gtctcatctc | tgtcaggaag | ccatccacaa | ctcctgccag |
| 42841 | tcatgcctcg | gctgtcctcc | aggtcttcct | gcagcactca | tgaatgcaac | tgcaccattt |
| 42901 | acaactgccc | aYtccaactg | cactagctga | aagccaggaa | taaagtaggt | gctcaataca |
| 42961 | tatgggctga | ctgacaactg | agggatgctt | tttactgaga | agagcagaaa | taaaagtcag |
| 43021 | caagacaaaa | atgtcagaMc | tStaagtttt | ctggcaaaat | gcctccacta | tactctgtta |
| 43081 | ttcaagcttc | acagctatca | aacagacggg | acagcctttt | ttgctttaga | ctattcacgc |
| 43141 | acagaagaac | caaaagggaa | acttgtcaga | ggggttgatc | ccagttaatt | ttcccagaga |
| 43201 | gaaggccaag | tggccaagca | Rttaaaccct | caactcccac | agcttatttt | ttttttaatt |
| 43261 | ttttaaagaa | ttatttttct | cagggtgccc | cttgtccagt | gtgcagacag | gagccaccca |
| 43321 | actcccacag | cttctatcta | ccctccaacc | ttgccatcct | ctgctgcctt | ctgctgagaa |
| 43381 | ctaggctgct | gatttaggtt | ggcaccagta | gcggtatcag | aaatgtaaga | gccagaacat |
| 43441 | attaactaag | aacctccatt | tcccaaaagg | aagctggtct | gcattgtcct | ggatctgaga |
| 43501 | tggagattag | cattaacYtg | ggatttcaat | atcgcctacc | tccaagcccc | acttctactg |
| 43561 | cagcctaggt | tcaggcaaca | ccctagaaga | caacttgcaa | atgagcatct | tgaatttttg |
| 43621 | gcccttccta | tgaaaatttc | ctaScaggtt | ataaacctac | agtggctaac | ccaaggacaa |
| 43681 | cacacatcct | tactcttggg | cacatctact | gctcttgtca | ccaggccaag | gaaatttctc |
| 43741 | tcttcaaaag | caaaagttcc | ttgatctatt | ttgaagtcaa | aaaagcatgc | tgccccatat |
| 43801 | tgtgtgttac | aatacaaggc | atattatacc | tggctgcttc | acttttagtg | aggttaaaat |
| 43861 | taaacagaga | gttaggtatt | gccagactaa | tggttttacc | acccattaat | gtcaggtgcc |
| 43921 | tggatctatc | acttccttag | ggtttgcaaa | ataatgattt | tcaacagaag | ttgcaaaatg |
| 43981 | ctgacttaca | ggtggtacac | aaccccaact | atgaagtatc | cttgacaaaa | aaaaaaagtg |
| 44041 | aatcaagctt | agatctaatt | atcagtatat | aggcaacaag | gggaatagtg | gaacaagtta |
| 44101 | agccgtacca | taataatgca | attaacaaaa | tccaggattt | aaggatttct | ataagattaa |
| 44161 | aaaaaaatga | ggtggtgtcg | agtggggaga | gaaaaaagca | ggaaacaaaa | ctggtgagag |
| 44221 | gaaatgaccc | cctgatgaaa | gatcttaaac | accaggctga | agattttaga | tttctaccta |
| 44281 | ttagaaatga | atattcactg | aggtttgatg | aagagtcact | gaagtgtcac | aaagaaaaca |
| 44341 | agatttgaga | aagattcttg | agaactcgtg | cataggaatg | aactgcaata | agggcagatt |
| 44401 | agagaagaac | taggccatga | gggcctagta | tccagaatga | ggcagaggga | gggacgctgg |
| 44461 | atgtgagcag | agaggatgat | gaccaattag | agatcagcgc | caaggagaca | gagaagtcaa |
| 44521 | gatgatgttg | aaatgtcctg | cctgggtaac | tgggagagaa | aatggtactg | tctggaccaa |
| 44581 | aataagaata | gtgacttctt | tcagaggtac | taaggcaggt | cctggttaga | gccatatgga |
| 44641 | atattaaaaa | atcctgtaag | ataacccacg | atcaacacac | acttcaaata | aaaaccactt |
| 44701 | tagcagcaga | cccatctgtc | ctgggccact | tggccccgct | agaccttgct | gatagagaac |
| 44761 | accaactcat | ctcttcactc | aacaaacatt | cactaaaacc | taaacaatgt | agcatcctaa |
| 44821 | gctaggtagg | gaggacccca | agatgaatca | gacacagttc | tagcctttga | taagcttaat |
| 44881 | tctaccttct | ttccctatca | atgagctgtt | acctatgaac | aggtagctaa | agtgcttgct |
| 44941 | tcagagatat | gagtccctga | taccagttcc | taactgccac | Rtatggcaca | taaacacctt |
| 45001 | caacacttca | gtYtatcctt | ggcctggggc | aaacaatYta | atgtgctttt | tcttaaaaaa |
| 45061 | aaaaaaaaaa | aaaaaaaaaa | aagatgacaa | ctgacctatg | cttggtccca | gaaaggtagg |
| 45121 | atactgggag | gaagccccac | tttattcatt | tccgagataa | ctgtgacgtt | caaaggaaat |
| 45181 | gtgctaaaga | cacagaccaa | aaggccaaac | tacaatcctt | gctgcatggt | aacaacaagc |
| 45241 | ttattaaatg | ctcatggacc | tcagaaatca | agttaattga | agcagtaaaa | accccagaag |
| 45301 | tgtacttatt | ttataatggc | ttagaaagag | gcatatctgt | actgtgctaa | caagttagag |
| 45361 | atgagatttc | taggtgtttc | ttctttcctt | cagatgtgag | agcttcccct | ttcttccctc |
| 45421 | agaaggctgc | aaagagggct | tgtggcatag | ggtagggatg | agtcaagaaa | ggagggttgt |
| 45481 | agaagccttc | tggtgagaca | agagatgggg | aacccaagag | tgagcacttg | gaagaatgtg |
| 45541 | agggcgtgga | gccttggagg | ttctcctgtg | caagaatgca | gaagcctcag | gatgggacaa |
| 45601 | gcgtaaaacc | tctcccatgg | agtggtacag | caactggaag | atgaggtcaa | tgtattcttg |
| 45661 | cctttaggcc | ccaccctggc | ttatgatgtc | ccaatccttc | ccctgatttc | tggtcatagc |
| 45721 | catcatcaag | taaagagaac | aagtacagcc | cccaccccag | caatcagctt | tgccttagag |
| 45781 | gctagaaagg | ggtatggtgc | gtactcacat | tctgtcaatg | atcttgatga | agatgctgca |
| 45841 | gtcctggagc | tgcagcacag | cctccacagg | gtcagccacg | tgtagactgt | tcacctgtaa |
| 45901 | atcaaaggga | acagcctagt | gagaccgtta | gaagcaacat | ggtttgctcc | ttttcccaga |
| 45961 | ggcttaatgt | gagtgcttac | agttgtagac | tataggaata | caagaactga | tgattctcag |
| 46021 | gtttttaatt | tcaggaagga | gtgccgttgc | actcactcat | ccagttacag | ccacctgaWa |
| 46081 | tgcaaccatc | agagagccct | tcctttggct | tcaactaaat | aaaagcttaa | actttcctaa |
| 46141 | gatgttccag | cactgggagt | attttggaag | gatacaccaa | taaattggta | ctaccactgc |
| 46201 | ttctaaagag | aggaacttga | cagcagggag | tctgaggtgg | gaaaagaaag | gctcttacat |
| 46261 | tataactctc | tgtagctctt | gaatgtatta | tagctctttg | tatttcttga | acgtttacat |
| 46321 | tataagtttc | tgtatccctt | ggatttttat | attatagtcc | tttgtggctc | ttgagttttg |
| 46381 | aaatatctat | tcaaaactta | aatattacat | atatgctata | cactcccaca | aacatataaa |
| 46441 | atcttattaa | tacattttat | attatagccc | tttgtggctc | ttgagttttg | aaatatctat |
| 46501 | tcaaaactta | aatattacat | atatgctata | cactcccaca | aagatataaa | atcttattaa |
| 46561 | tacattttta | ttctttccac | acataaagct | ttggctgagg | ggagaaggga | aaaacaatag |
| 46621 | gggaacaaga | tgatttttta | aaaagggggt | ggagggagcc | aagcgcggtg | gctcacacct |
| 46681 | gtaatcctag | cactttggga | ggctgaggcg | ggaagatcac | ttgagctcag | gagttcaaga |
| 46741 | ccaacctggg | caacatggtg | aaaccctgtc | ctacaaaaaa | tacaaaaaat | tagccaggag |
| 46801 | tggtggcaca | tacctgtagt | cccagctact | tagaaggctg | aggtgggagg | atcaccttag |
| 46861 | cccagggagg | tcgaggctgc | agtgagctgg | gattgcatca | ctgtactcta | gcctgagtga |
| 46921 | cagagcaaga | ccctgtctcc | aaaggaaaaa | aaaaaagaaa | agaaaagaaa | aaaaaagggg |
| 46981 | gcggtggggg | atgaaagaat | aggagctggg | aatttcaaag | aaaaacttct | taattctaat |
| 47041 | ttagttgcct | gttcccattc | tttggcttca | gataggcata | catttaaatc | agtttttacc |
| 47101 | actagaatat | tcaccagggg | tcacacacat | caggtacaca | ggttattcaa | taagtataca |
| 47161 | tggtcaacct | ctacaggaaa | acctcatgaa | ttccacaggc | actacagttc | agaagtagcc |
| 47221 | tgggctgaag | tttacgtttt | tattactata | ggaagaaagg | gtttgctaag | ttaattattc |
| 47281 | acatattcaa | cactaagagg | ggagagagac | tgagcctgct | ttaagaaaca | aggtatttta |
| 47341 | aagaacttca | gcatagtggt | tatgtgcaga | caactagatt | ctattgctta | caaatgtgtt |
| 47401 | ctctatattt | gggctgggag | ccagtacata | cacactttgg | gcccagctcc | tccacaaact |
| 47461 | tgccagcaac | ctttgttaca | aactttattt | ctctctgcac | tagtttcctc | ccttgccaaa |
| 47521 | tggatggaat | ccctacttta | tctacttcaa | aggaccagtg | tgagctcaaa | tgggattatg |
| 47581 | gatgcaagaa | cacattaaaa | aatataaagt | aggccaggtg | cagtggctca | cacctgtaat |
| 47641 | cccagcactt | tgggaggctg | aggtaggggg | actgcttgag | gctgggagtt | taggaccacc |
| 47701 | ctgggcaaca | taacaatacc | ttgtctctac | taaataaata | aataagcaag | caagcaagct |
| 47761 | ggacatggtg | acatgtgcct | gtaagtccta | cctacataag | aggctgaggt | aggtggatca |
| 47821 | tttgagccca | ggagctggag | aagttacMat | gagctatgat | agtgtccctg | cactgtggcc |
| 47881 | tgggcaacag | agacatctca | aaaaaaaaaa | gaaaaaagaa | aaactaataa | acataaagca |
| 47941 | ctattatggt | taataaaatt | aaaataatga | agtagacata | acatttgtat | ttcttaatag |
| 48001 | ttaagttagc | tgcatgcact | atagaattaa | gaggattttt | aaaaatcaat | gatttctcta |
| 48061 | cagacatgat | agtatttatt | tgagttaaaY | actttcacat | ttaaaaacaa | cttttaggcc |
| 48121 | aggcgcagtg | gcccatgcct | gtaatcMcag | cacttgggga | ggctgaggtg | gaaggactgc |
| 48181 | ttgaggccag | gagttcaaga | ccagcctggg | caacataagg | agaccctggc | tctacaaaat |
| 48241 | aataatttaa | aaaaattttt | agctgggtga | ggtggcttgc | gcctgtatgc | tcRcgtagtc |
| 48301 | cctgctactc | gggaggctga | cgtgggaaga | tcgcttgagc | ctgggaggtc | aaggctacag |
| 48361 | cgagctatga | tcacaccact | gcactctagc | ctggccaacg | gattgagacc | ctgtctcaaa |
| 48421 | aaaataaata | aataaataaa | tacaacattt | aggctaggtg | tggtggctca | tgcctgtaat |
| 48481 | cccagtgctt | tgggaggacg | aggagggaga | atcgcttgag | gccaggagtt | tgagatcagc |
| 48541 | ctaggcaaca | tagcaagacc | ctttccccaa | aaaattaaaa | aaaaaaaaaa | aaagagagag |
| 48601 | aaaggaaaaa | tagcccagca | tggtggtgca | tgcctgtggt | cctagctact | caggaggcta |
| 48661 | aggtgggagg | cagaggattg | cttgagtgca | ggagttccag | gctgctgtga | gctatgaagc |
| 48721 | tgcaactgca | ttccagcctg | ggtcacagag | caagacccta | tctcaaaaag | Mggaatcttt |
| 48781 | tagatgaatc | ccagttaaaa | cagattaaaa | ttttttttaa | cgtgaaataa | aatatgactt |
| 48841 | attgacgtct | taaagagttt | gctaatatat | ttataatata | tttttactgt | cttttgaaaa |
| 48901 | aagctcaatc | taattggtca | ggacaggtca | ttgtaagttt | tctaggaaga | Wtctgaaaac |
| 48961 | ttcaggccaa | gattccattt | tacctgcaga | aaatgaagag | actgccaagg | ctaaaccatc |
| 49021 | tcctatcaat | acctgcaatc | taggtaaaac | attcaaggac | tatggatgct | tgttcactaa |
| 49081 | caagactaaa | aaatcatacc | aattagctga | tgtaaagtct | cctaaggaat | ctggattcat |
| 49141 | cacatatacc | aattaagtaa | taatccagcc | acagttcctt | tcatggatat | aaaaatattt |
| 49201 | tttcttcctg | tgagttattt | ttgctctcaa | gtgagaaatc | atttaaaagt | tgaggaagta |
| 49261 | gagaagttcc | ttcatctcta | gtcagggcat | aaaacatgag | agtgaggacc | aggctcacca |
| 49321 | cataactcaa | gagttgcctt | taaggattgc | aaggttgctt | aaggttgtca | aatcttaaaa |
| 49381 | taccctgtaa | cagtttattc | attattaact | gctgtttaca | gaatagtttc | aagctataat |
| 49441 | ttaagtatta | ataaaataaa | ccactaattt | atttttatgt | tataaattac | tgaaaattca |
| 49501 | gaagacaaaa | aacagagctc | ccaataattc | tagtatttta | atacaggtac | ttttagcatt |
| 49561 | ttgatgtatt | tctttcgttt | tttctaggta | atttttttta | aactgtagtt | ggaattatca |
| 49621 | tgtgtgtgta | tgtgtatgtt | ctatgccact | cttctcacta | acataacaga | tgcattattt |
| 49681 | catgctacta | cagtttcata | aaatttgctt | tagctccaca | acttttgttt | aaattgaaaa |
| 49741 | cattctctat | actatattta | tatatatttt | taagagacag | gctcttgcta | tgttataggt |
| 49801 | tggagtgcag | cagctattta | cagatgcaat | catggctaac | tgcaacctca | aactcccggg |
| 49861 | ctcaagcaat | tctcccatct | cagcttccca | agtagcaggg | actacaggtg | tgcactactg |
| 49921 | atcccagcac | atataactat | actttaacat | tttcatgcat | gttctttgtt | tKtttttttt |
| 49981 | tttttttttt | tttgacacag | gctttcactc | tattgtccag | gccggagtgt | agtggcacga |
| 50041 | tcacagctca | ctgcagcttc | aacctccaca | gcctcaggtg | atcctcccac | ctcagcctcc |
| 50101 | taagtagctg | gaaccacagg | agcacaccac | cacacccagc | taatttttgt | attttttgaa |
| 50161 | RaRacagggt | Ytcaccacgt | tgcccagggt | ggttgcaaac | ttctgagctc | aagtgatcct |
| 50221 | ccacctcagc | ctcccaaagt | gctggcatta | caggtgtgag | ccactgcacc | tggcctcatg |
| 50281 | catatttatt | gtgacttttc | agaaaaggat | gtaagtagct | gctataaata | aaactagtct |
| 50341 | taggccaggc | gcagtggctc | atgcctacaa | tcctaacact | ttgggaggtc | aaggcgggtg |
| 50401 | gatcactgga | gctcaggaat | tcaagaccag | cctgggaaac | atggcaaaac | ccagtctcta |
| 50461 | ccaaaaatat | aaaacattgt | attttttttg | aggtcacatt | aaaattgagg | tcagaagttt |
| 50521 | gagaccagcc | tgggcaactt | agcaagaccc | catctctaca | aaaagttttt | taaaattagc |
| 50581 | atggcatgta | cccctgtggt | cctagctact | tggggggctg | aggtagaagg | atggcttgag |
| 50641 | ccccaaagtt | tgaggttaca | atgaactatg | attacatcac | tgtactccag | tctaggcaac |
| 50701 | agaatgagac | tctatgtcta | ttttttaaaa | aaagaaaaat | ggttggctct | ccaattggcc |
| 50761 | ctgattaatc | agtactcagg | gtgaatacta | aaatatcctg | tgtcaactag | catgcccagg |
| 50821 | aagtatttta | aatgtcaaga | actatgattt | attgagataa | catgctaaat | gactgcatgt |
| 50881 | atgtgggtac | ttgtgcacac | tatatgtatc | tcattatcct | tgtaattacc | ccatgagata |
| 50941 | ttttatttta | ttttttcatg | gtgccaagag | aaattagaac | tttatgaggt | attttaattt |
| 51001 | aaaatcatcc | ccattaaaaa | aaatgatact | ggccaggcgt | ggtggctcac | acctgtaatc |
| 51061 | ccagcacttt | gggaggtcaa | ggagggcgga | ccacgaggtc | aggagatcga | gaccatcctg |
| 51121 | gccaacatgg | tgaaacccgt | ctctactaaa | aatacaaaaa | aattagctgg | gcatggtggc |
| 51181 | gtgcacctgt | aatcccagct | actcgggagg | ctgaagcagg | agaattgctt | gaacccagga |
| 51241 | ggcagaggtt | gcagtgagcc | gagatcacgc | cactgcactc | cagcctggYg | acagagcaag |
| 51301 | actccatctc | aaaaaaaaaa | agatactgaa | gatactgaga | ggccaacttg | ccctgggtca |
| 51361 | gagagaccag | tgctgtgatt | ctatgctggg | catgtgactc | tgagacccat | atttatcacc |
| 51421 | acactccatg | gtctcctctg | tttctttagc | tttatttatt | atttttatat | atatttttga |
| 51481 | aacatggtct | cactctgtcg | cccacgctgg | aatgcagtgg | tgcaatcatg | gctcactgca |
| 51541 | gcctcaacct | tcagggctca | agggatcctc | ccaccttagc | ctgccaagta | ggtgagacta |
| 51601 | caggtgcacg | acaccatgcc | cagctgattt | tttaattttt | tgtagagaca | ggtttttgcc |
| 51661 | atgttgccca | ggctggtctt | gaactcttgg | gctcaagcRa | tcctcctgcc | tcagcctccc |
| 51721 | aaagtgctgg | gattacaggt | gtgagccacc | acatccagcc | tctctagctt | taaatatcca |
| 51781 | atgcactcta | ttattttttc | atttgccact | gtctctggta | gaaaatgtat | gaatgatcta |
| 51841 | gcaaaagaat | tttgatgaag | taatcggcaa | ggcaacattt | gctgatggac | aatggcaaca |
| 51901 | gacagaaagg | tggtaagaga | gtgatgagaa | ccttgtccta | gattaaaggc | ctttgaagac |
| 51961 | caaagtccct | gcatatgttg | atcattaagg | tcagcattta | ccacYccccc | tttttttttt |
| 52021 | ttaatttttt | agaccgagtc | ttgctctgtt | gcccaggctg | gagtgcaatg | gtgtgatctc |
| 52081 | ggctcacagc | aacctccgcc | tcccgggttc | aagtgattct | ccggcctcag | cctcccgagt |
| 52141 | gactgggatt | acaggtgccc | gccaccacag | ccagctaatt | tttgtatttt | tagtagagac |
| 52201 | gggggggttt | caccagcttg | gccaggctgg | tctcgaactc | ctgacctcag | gtgatccacc |
| 52261 | tgcctcggcc | tcccaaagtg | ctgggattac | aggcataagc | tccgcacccg | gcccacattt |
| 52321 | acccttttat | tcagaaaaat | acacacagag | cagatgaaaa | tgcatttcca | tgctgtctaa |
| 52381 | aggaaaacta | tttagtctag | aaatgagaag | actttacata | gccctggctc | ctacaaaact |
| 52441 | cctctcctaa | ctctctcaag | cttcctggag | aagtatagcc | aacaaaagag | aggaagacta |
| 52501 | cttacccaag | agaggagtgc | agccccccgg | gtggcgtgga | gtgtcatctt | ggtgatgcca |
| 52561 | gacagtcact | ccaatgcgcc | tggaacccaa | gagaggaaga | aaagcagtta | atcatatcag |
| 52621 | atatccatga | tcaagaaata | aaggcgaaat | ggttcaattt | gccaattctc | aacacttaaa |
| 52681 | tcactcttca | ctgaatccac | caagacacca | tgggaatttt | tagaaagctg | agtacacatg |
| 52741 | acaattacta | tagagcttac | atcagagacg | acaggaaaga | attgtgcatt | taactcaatg |
| 52801 | tctaccccat | gtaatttttc | agttccacag | aaaatacaac | atccaaagct | ggccttcaac |
| 52861 | cctactcttt | gggacatgat | gcccttaaat | atggaacaaa | catggttttc | agacagacct |
| 52921 | gggtctggat | gctgatttaa | tgtgaccagg | gtcataggac | cttagacaag | caacataacc |
| 52981 | tctttYagtc | tttttcttta | tctgcaaaat | gggatccaca | tacacctctc | tgggttattg |
| 53041 | tgatgcttaa | agataaagca | aatagtacgg | tgcctggcac | atggtaggtt | gtcaataaat |
| 53101 | aattactgtt | cttaagcaga | aatgttgatt | tctagctctt | tctacaggta | cccaaattgt |
| 53161 | acctaacaat | acctaagtcc | ttggggaaac | tgttctagtt | tctggatttt | tatatcctcc |
| 53221 | acagaaatgt | ctcacaaaca | cagttcaaat | gggggattga | gaatatccaa | acttaggtct |
| 53281 | ctggatgagg | tcgagcccaa | ttccggagga | gatcccatgg | gacatttaat | gaaaattaSg |
| 53341 | cacctgtcct | ggtgttctca | tccccaattt | cctttcccat | tgagattctg | ccacctgcct |
| 53401 | gccaacccac | ccaagagacc | acagaccaga | ttaactaaat | attcaccaac | acctcctagc |
| 53461 | aacccttgca | attttcacta | atctccaggg | gcacaatgag | ccctgccccc | atctcctgcc |
| 53521 | acacgtgctc | agtctgtaat | tactctagaa | ggaggaacaa | gagtggtaag | agccacatca |
| 53581 | cttgtaagtc | tccccatata | ttagcatctc | cagagtgtgg | gctctgtgga | accagtctca |
| 53641 | tgtatgcaag | ttggggataa | agaaagacac | cattcttgcc | cagaaggtgc | tcactgtcta |
| 53701 | gtaMgggaaa | gagatacgaa | aatctgaaaa | ttcactcccc | attatctctt | ggtccttcct |
| 53761 | atccaagtat | actctattta | tcagccaacc | gaaaggtatt | ttcttagttc | ctaaatatga |
| 53821 | tcatcctcgc | tgggagcagt | ggctcacgcc | tgtaatccca | gcactttgag | agaccaaggc |
| 53881 | gggtggatcg | caaggtcagg | agatcgagac | catcctggct | aacatggtga | aaccccgtct |
| 53941 | ctactaaaaa | tacaaaaaaa | ttagctgggc | atggtggcgg | gcgcctgtag | tcccagctac |
| 54001 | tcgggaggct | gaggcaggag | aatggcgtga | acccgggagg | cggagcttgc | agtgagccga |
| 54061 | gatcgcacca | ctgcactcca | gtttgggtga | cagagcgaga | ctccgtctca | aaaaaaaata |
| 54121 | ataaaaaaaa | agatcatcct | gtgctagaag | ccacatggaa | aatgggagac | aatgacatgg |
| 54181 | tccttgcctt | tgaggggctt | atagcagggt | agggagtaaa | attaaacata | tgtgaagcac |
| 54241 | taacagaaga | aaataattaa | atgctaaata | taactaaatg | ctaattacaa | ttaagtgctt |
| 54301 | cctgaccctg | caacatccaa | catgattcca | catgtcatac | cagcatcagt | cttggaattg |
| 54361 | agccaattca | cctgggcttt | ggcaagggca | aatgaaatgg | ttaagagagc | tctcaggagg |
| 54421 | gcagaaaagc | taaggggctt | atgttcctca | gtcttggata | attatcatca | agtataccct |
| 54481 | atccatgggc | aagattatgt | agcccttgag | gccaggcatg | gatggatgca | gatagcccca |
| 54541 | actactgcac | tgcaataagg | cttttctgtg | gctgacaaga | ctaaagctcg | agggaccaca |
| 54601 | cttggctctg | tggtSgggcg | gcaacagcca | gacactcaac | tggggtttct | ttaaaaaaaa |
| 54661 | ggcctctgag | ctattaaatc | acaaggaatg | aggctgagat | caccgctccc | ccatcctcac |
| 54721 | tgctgcctat | agacttgcag | tccttttgat | gaggcccaac | acttcgaaat | tttatctgca |
| 54781 | actgtaggca | gatcttgccc | cctttgaaag | actcacagct | gtgctactaa | aaatgtcctg |
| 54841 | aggtttaacc | aacctcttca | tctcagaggc | aaaacataca | accctgaggt | cctcccagga |
| 54901 | gagcctgtct | aaaactagtt | ccactgttca | agaaaatgag | tgtcaaggct | aaatattctt |
| 54961 | ttctgtgttc | cccaggcaca | gaaatacgag | gaacccaata | ttcaccacta | ggaactcctg |
| 55021 | aaggaccttg | tctgctcttc | agttctaagc | ctgtaaagag | gtactttcct | agagacagaa |
| 55081 | catcagggtg | agagaggctt | caggagagcc | ccagccattc | cctcttctct | gggtaaggaa |
| 55141 | tgactgaagc | caggagcaca | gctaagtctt | ctacattggg | actatagctt | taagcagact |
| 55201 | ttggctggga | acccaagggc | tcccagccag | agtaccatcc | tccccaccct | ccccctgaaa |
| 55261 | tctgaggcag | gccccaccca | gtacactggg | tgatgctgat | ggaaaaMcag | atccttgcga |
| 55321 | ttgtagcctg | gaaccatttc | acagaaggat | ctgctgagat | ccaccccagc | tggatcaggc |
| 55381 | accccccgtc | ccccccacaa | ccctcactca | ataaacaaag | aaacaaaagg | ccaggccctc |
| 55441 | tgagggcacc | tttggagttc | ccatctacct | gattctctga | gaaagaaatt | cccccagaat |
| 55501 | ctaaaacaga | ggcctcaccg | agctggtaag | gcaccctctc | ttttccctgg | tctcaagaag |
| 55561 | taaccaagga | cacagaagca | gttgcgttat | aaacttaagg | ccctgcatcc | tttttacatt |
| 55621 | tcccaaactg | acacaatgca | gctcccccac | atcaggacaa | attcccacat | ttacagtaac |
| 55681 | ccctgtttcc | agaaaataaa | tatcaagata | aggaaagtga | cactaaagag | acacgcagcc |
| 55741 | actctgcctg | taccctctct | ggaccttaaa | gagttaaagc | ctagccatga | tttcctacca |
| 55801 | gggctgaggc | taatgtaaac | cacctgctca | gacRcaagaa | gcaggaccag | agggtcaagt |
| 55861 | tgctgagctc | tgaagtctgt | tctgaaaaag | cttcagtttt | aagtacagaa | caagtgatag |
| 55921 | gccaaaggcc | agagggtctg | agctgcagca | gcactgctct | ccttaccccg | cccttggcct |
| 55981 | gggtgccagc | tcctttgaga | ctgcctctta | gccacttact | gcccatcaag | ggaacaccag |
| 56041 | acctacctca | agataacacc | aaagtgacct | ttggtcccag | agagttgtta | aactataccg |
| 56101 | atctctcagc | tcatgggccc | ttgcttctgc | tgaaccctca | ttctcttagt | gctaactccc |
| 56161 | actcccagaa | tttcagggcc | caaagcccac | acaagctccc | acctcaaagg | gtccttccca |
| 56221 | gaaccccacc | cccttctcca | cctgatagtt | ccaaaggcct | acagcctcac | agctcacaaa |
| 56281 | ggaaatggct | gccccatctg | tgcgccagtg | ctcacttgca | aaatttacca | ccacttaccc |
| 56341 | tgagacgctg | cctgcctgta | gcctaagaat | tccatgctct | gtaccccttt | cttagaaaga |
| 56401 | tactccccat | ctgagagaca | ctcacatcca | aagagtgaaa | accctgatct | tggggctcct |
| 56461 | cctcctccaa | ctctRggacg | gataggccag | gaggcacatg | caagcaaaca | ccgagatctc |
| 56521 | acctggcagg | ttacccagag | gggccaagcc | accttgccct | aggctaataa | gctataaaaa |
| 56581 | cagcatagga | aatactttgc | tggtacatcc | cctgcctctg | agaagataaa | aggcaagagg |
| 56641 | accagtggct | ccaagagacg | ccatacagag | aaaaacaatc | tttctcaatt | cctggggagt |
| 56701 | cctgggtaga | ccgtctggtc | caagtccaaa | gagtttcctg | aggtcggggc | aaaccagttt |
| 56761 | ggtccatcta | aagggactag | cttgggctga | agcctcctct | tcacacagac | cactccatct |
| 56821 | ttgtagccta | gagtttggca | cagaacccca | aagccctgga | gaggaacaag | ggagggatta |
| 56881 | cagaggaaac | caagcttctc | tggtttcttc | aaaagtggct | tacagatgtc | tgccccttct |
| 56941 | ccccgttctc | tggagggtcc | agatcaggat | gatggcaaaa | gagctgcaat | caggaaccag |
| 57001 | acctgcaacc | aggcctgcag | ccatgtattg | tactggggcg | cgtacacata | caYacacaca |
| 57061 | cacacacaca | cacacacaca | cacacacaca | cacacacaca | cacacacaca | cacactgacc |
| 57121 | tgggcccccc | accactatat | tcacacaccc | tggtccctat | cagctgacaa | aatgaacctt |
| 57181 | ttttcactgc | ccaccaccgt | gcacacaccc | acggcctcac | gcagaaatgg | tgaagccctc |
| 57241 | tcctgagctg | tctctacagc | tcaacgtgca | ggcaaacacg | ctttccttct | ctgaacaaaa |
| 57301 | acatgctgac | atctacgcaa | gggggaaaga | aagcaaccct | ttgctctgaa | aggcNccaac |
| 57361 | tcccggatgt | tggcaagctc | tgctccacag | cgcctgtttc | tgagtatgtt | tacttgctct |
| 57421 | ccctcttctc | tccctcccct | ttaaggatgg | cgcaggaaag | ggaggtgagg | ggggagaatc |
| 57481 | caccccaccc | cctcgtccat | gtttgaacaa | aaacccagag | aaagagtgag | ggagaaaaag |
| 57541 | tctcggtgcg | ggggggcctt | accagactcc | taaagccaaa | cgtatctaca | ggttttaatc |
| 57601 | cgccattagc | atttaaatct | tgaaaggaga | ggaggaaggg | ggggccagtg | gaaagtaacc |
| 57661 | ccacacacaa | aagaaaagtt | gttggttttc | ttctcagtct | gcctggcagg | agcgatcKtc |
| 57721 | ctggctgaca | gccagaagtg | cgtcacagcc | aggagtctgc | tttctttaaa | ggcacagcaa |
| 57781 | gcttccccga | tctgggagcg | acagcaagca | ggggactctc | agtgggggtg | gggcccagag |
| 57841 | ggagggggtg | cactggagag | gaggggctgc | aaaggggaag | gctggaggct | tggtccacga |
| 57901 | acaagaaaag | caggacgaat | gggggcggcg | ggttgagggt | gaaggcacaa | gcaggcaggc |
| 57961 | aaaattactg | aactccaaca | gcagcaagag | ccaaggcaaa | ctgtggcata | aacacacaaa |
| 58021 | acacatctta | cagtggcctg | cctgacaaac | tgggatcaac | cggacactcc | cccttcgctc |
| 58081 | tgttttccac | ccagagttta | aggcagcagt | aataatctgt | ccatctctct | ggacagcaat |
| 58141 | ggaagggtag | gacaagggct | gtcctgataa | ttagatcagc | ccctgcctgg | cggaccgcag |
| 58201 | ggcaaggagg | aagacccggg | aacagaggct | ttgaagaaca | agcaacatgc | aggccctctg |
| 58261 | atcgggggca | ccttcctgcc | ggccccaggg | caggctgtgt | ctttaagtac | aaccatgcca |
| 58321 | ctcacacaca | aagcgccctg | ccaccttcca | tgggcaccgc | ctgccctgct | ctgggacacg |
| 58381 | gccacccact | aaatccattc | cccgagggaa | tctctccagc | ccataccttc | tgcgtggcaa |
| 58441 | ggccaggatg | ccgtgctgtg | cccgctcctc | cccctccgcc | acccaaacaa | gaagcccagg |
| 58501 | cagattctgg | ccctggagta | caggcctgcg | ctgtcctgtg | ctgcgtgcta | ttgtcggctg |
| 58561 | tggaatggcc | gccaaaatcc | cagctgtgct | gccagaacct | aatcccctgt | tccgctgagc |
| 58621 | atttatgggg | aggggctgag | gggccaaggc | acgagaccga | gtacgccagg | cactggctgc |
| 58681 | agcccttaac | agacgcaggc | acSgggactt | gtagactctg | cttctcctac | atggctgaaa |
| 58741 | acaaaagatg | tctgactctt | agaagacaaa | aYcacagcat | ttccccccac | tgaatagcga |
| 58801 | acttcaccaa | ggctgaaagg | gaagcccacc | agatggtcaa | caggcacccc | ctaatcttat |
| 58861 | gccacaaaca | tttactgagc | acctactatg | tgtaaggcac | tcctatagga | aactgtagga |
| 58921 | agtatacaaa | gatgaattaa | gcccagcatc | cgcactgagg | taggttgtaa | ttcacaggag |
| 58981 | ataagaaata | tgacttgaag | attaatttca | aactggtgtg | ctaacttcca | taaaagctgt |
| 59041 | aaagaaaaat | tctaaccagt | ttagaatagg | gaaggattac | gaaaatgaag | tgccatttta |
| 59101 | atttggacct | tgaaacacac | aggtagcatt | tccccagatR | gaaacagaga | ggtgtgggga |
| 59161 | ggaagagaaa | gcagagagga | ggcatggaag | cagtgggaga | aagggcttga | agagtgaggt |
| 59221 | ggggtcagag | agctaggaga | atcttgaacc | tcaaaccaag | gaatcaaaga | cttgtaagtt |
| 59281 | tgtttgttat | taacacagag | ctgtggtatg | acaaaaactg | tgccccaagt | ttattctgat |
| 59341 | atatacctga | atgagactag | cagcaatgag | gtgagtcagg | aagctgcaca | gtcaggagac |
| 59401 | aggtaatgag | ggcacacaag | agggtaaggt | aagaaagaat | ggaaaggggS | cttggcacga |
| 59461 | Yggctcacac | ctgtaatccc | agcactttgg | gtggaccact | gaagtccgag | agttggagac |
| 59521 | cagccggggc | aacataggga | gatcccatct | ctacaaaaaa | tttcatgaat | aaaaaattag |
| 59581 | ccgggtgtgg | tggcccgcac | ctacagttcc | agctacttgg | gaggctgagg | tgggaggatc |
| 59641 | acttgaaccc | aggtggaagc | tgcagtgaga | gacattgtgg | agacagggta | aagaactgat |
| 59701 | aggaggcaga | gagaggaact | gtacagggga | ggaaagtatg | agggatgata | tgcagaatta |
| 59761 | aactgaggag | atgacaggat | gtcagaacaa | gagagaaaac | agagtataat | aaatagtagc |
| 59821 | tggtggggca | cggtggctca | cgcctgtaat | cccagcactt | tgagaggcca | gcctgggcaa |
| 59881 | catggcgaaa | ccctgYttct | accaaaaaat | acaaaaaacc | acacaaaaaa | acaaaaacaa |
| 59941 | aaaattagcc | aggcggagtt | cttttttttt | tttttttttt | ttttaaagca | gggtctcact |
| 60001 | ctgtcaccca | ggctggaggg | cagtggcgag | atcatagttc | actgtaacct | caaacttctg |
| 60061 | ggatcaagtg | atccatctgc | ctcagcctcc | caagcagtgg | gagtacaggt | gtgtgccacc |
| 60121 | atgcctggct | aatttttttt | tttttttttt | tctgtaRaga | caggctctca | ctatgttgcc |
| 60181 | taggcacagc | attattttaa | attcttctct | aaaaattcta | tgcttctccc | aaagccctgg |
| 60241 | gatacaggca | tgaaccacca | cacctggccc | acagttgtct | ttgtcttttt | ctactaggag |
| 60301 | ctatactata | gaggtcacaa | tcattggcta | cagtttataa | tatataggct | aaaatgtttt |
| 60361 | acatataaRa | taaccagtaa | aacttcatga | tttaRaaaca | aattagtgtc | ttttttagtg |
| 60421 | tcaRaRtccc | agctactcag | gaggctaggg | tgggaRaatt | ccttgaactc | ggaatgagca |
| 60481 | gagatcatgc | cactgcactc | cagcctgggt | gccagagcaa | gactctgtct | caataaatac |
| 60541 | ataaataaat | ggacagatag | ataaacagag | agacagaaag | acatatagta | gctaatgctt |
| 60601 | actgagtgca | tactatgtac | Rcgacactat | tctactgacc | taatatgtac | gaactcatta |
| 60661 | atcttaaaaa | ctcccttaat | gaagtaggta | ccattatcac | ccaactttag | agaggaggat |
| 60721 | attgagccac | aagattaaat | aatttgccaa | gatcacatag | caagtaaatg | gcagaagtct |
| 60781 | ctaccacatg | ctgctaacta | tttgacattg | gcaagaaact | tctgaacttt | agtatcccta |
| 60841 | tttgtaaaac | aagaataaag | acacctgtta | taaagcaatg | aaaattaatt | caataacacc |
| 60901 | tataaggtgt | ccaacacact | ggctagcatg | taaggcatag | gatgggtgtt | tcctgcagac |
| 60961 | taattcctac | ttggcatttt | ggtcccttgt | caccaaggtg | tccaagcaga | agttggctca |
| 61021 | ccaattgttt | gggaagccag | agagggtatt | ctgcctggag | caggagactg | gatcctctgt |
| 61081 | ctgtctgcct | tcttcccatc | agtctgcctc | tctagatttt | actttagggt | ccagctcaaa |
| 61141 | tatttaatat | atttgattta | atattcctaa | ctcctcaaat | atttaacagt | taacaggggt |
| 61201 | tactttNgSg | ggggggagga | gttagattgt | agggaacatt | cacttgggga | cttYctatgc |
| 61261 | tgtatgtttg | cttttttttt | tttttttttg | agatggagtc | ttgccctgtc | acccaggctg |
| 61321 | gagtacaatg | gcatgatctc | agctcaatgc | aacctctgtc | tcctgggttc | aaatgattct |
| 61381 | cctgccacag | cctaccaagt | agctgagatt | acaggcacct | gccaccatgc | ccagctgatt |
| 61441 | tttttatttt | tagtagagac | agggtttgac | catgttggcc | aggcttgtct | cgaactcctg |
| 61501 | acctcgtgat | ccgcctgcct | caggctccca | agtgctggat | tacaggtgtg | agccactgtg |
| 61561 | cctggccttg | catttatttt | taataatctt | gtattacact | ggtgataaga | aaaatgtaac |
| 61621 | tacctcctac | tcttggcact | tatgtgtata | tgcatgaaaa | tcttgtcttc | acatctagaa |
| 61681 | tggaaattcc | tcaagggcat | aaccagttcc | acctctctct | ctctgtgatc | ccccataaca |
| 61741 | cctagcacac | tagggctcct | taaatctgct | tctccaaact | acatctggat | gtcaggttta |
| 61801 | caaattcaac | tttctggcca | ccagagaatg | actgtggtgg | gtggttggga | tgaSgtgggg |
| 61861 | gtgggggtca | gaccaaggct | cattgctgta | ggctccccat | cacctgctgc | ttcttccagg |
| 61921 | ccctgtaagc | tattcccact | gtatcatttg | tagtctgtag | ttagcaatca | ctattagtag |
| 61981 | aaatggaagt | tcttatccaa | aggagcacca | tgaaagcaaa | ggcaaagcag | ataccaaaac |
| 62041 | ttttacagaa | aagcaaagtg | gcaaacataa | ttgtttgggt | ttttgttgtt | tttgttttct |
| 62101 | tgagacagtc | tcactctgtc | acccaggctt | gagtgcaagt | ggcacaatca | tggctcactg |
| 62161 | cagcctcagc | ctcctgggct | caaacaatcc | tcccacctca | gcctccggag | tagttgggac |
| 62221 | cacaggtgca | tgccaccacg | cctgactaat | ttttgtattt | ttttgtagag | acagaatttc |
| 62281 | accatgttgc | ccaggctggt | ctcgaactcc | tgggctcaag | cgatctgcct | gcttcagcct |
| 62341 | cccaaagtgc | taggattaca | ggcatgagcc | atcacaggcc | tggccaaact | taatttaaag |
| 62401 | actggcatta | tcaatgctcc | agaaaatgta | taaggtgaaa | ataggaggga | ggcctgctaa |
| 62461 | aactgccctg | gccacatatg | gcaatgcatc | agccctgaag | cttcctagcc | cagatagaat |
| 62521 | tgatattgtc | tcaaaagcgt | acaagaggtc | tccccagcct | ggccccttgc | tctaaactca |
| 62581 | aggcaacagc | ttccagctgt | gcagcttccg | agaggctgaa | ccttccccta | gaacccctct |
| 62641 | gcaaagctgc | caagtttctg | ggccagctct | tcaggacagc | ccaaggagcc | tggccagttt |
| 62701 | cgccaggctt | tccctcctct | tcctccctcc | tgtggcagca | gcagaatttc | cacagcccct |
| 62761 | ctcacagcct | agacaggcag | caggcggcca | catggctcct | gcctgattct | tactgtcctc |
| 62821 | agaagagcgg | gaaaggagtg | gtaaaacctt | tctagaaaaa | gagaagggcc | gggcacggtg |
| 62881 | gctcacgcct | gtaatcccag | cactttggga | ggccgaggca | ggcggatcac | ctgaggtcag |
| 62941 | gagttcgaga | ccagcctgac | caacatggag | aaaccccatc | tctactaaaa | atacaaaatt |
| 63001 | agctgggtgt | ggtggcgcat | gcctgtaatc | ccagctattc | gggaggctga | ggcaggagaa |
| 63061 | ttgcttgaat | cctggaggcg | gaggttgtgg | tgagccgaga | tcRtgccatt | gcactacacc |
| 63121 | ctgggtaaca | agggtgaaac | tccatctcaa | aaaaagaaga | aaaagagaag | aaagaaaggg |
| 63181 | gtggagagcg | gggagaggga | gagagagaga | gagagaaagg | aacaaaggaa | ggaaaagaga |
| 63241 | gaagaaagga | aggaaagaaa | ttactttaaa | ttcagtaggg | agggctgggc | acagtggctc |
| 63301 | atgccttaat | cccagaactt | tgggaggtcg | aggtgggcag | attgtttgag | ctcaagagtt |
| 63361 | caagaccaac | ctatccaacg | tgacaaaatc | ccatgtctac | taaaaataca | aaaattagct |
| 63421 | gagtgtggtg | gcaggagcct | gtaatctcag | ctacttggga | ggctgaggca | agagaatcac |
| 63481 | ttgaatccgg | gaggcggagg | ttgcagtgag | ctgagattgc | gccattgcac | tccagtctgg |
| 63541 | gtgacagagt | gggactccat | tgcaaaaaaa | gagaaaaaaa | aagaatttta | aattaaaata |
| 63601 | aataaataaa | tttcagtaga | gttcagatag | aggttgaagc | ggggtggtga | ctggttagga |
| 63661 | gcacaaaggt | tatttcaaag | ggtcaggtga | tcctcctgcc | tcagcctcct | gagtagctgg |
| 63721 | gactacatgc | acatgccatc | gcatcaggat | ttacattatc | atttttgaaa | gtttaaacaa |
| 63781 | aaaaagactg | gagctgggtg | tggtggctca | tgcccgtaat | cccagaactt | tgggaggcca |
| 63841 | aggtgggagg | ataatttgag | ctcaggagtt | caaattcctc | aggagttcaa | gaccagcctg |
| 63901 | ggtaacatag | cgagatcccc | atctctacaa | aaaataaaag | aattagccag | acatggtggt |
| 63961 | gtgtgcctgt | agtcctagct | actcaggagg | ctgaggtggg | aggattgctt | gagtccagga |
| 64021 | gtttgaggtt | atagtgagct | atgatcatgc | cactgcactc | tagcctgggc | aacagagcaa |
| 64081 | gacacgtctc | aaaaaaaaac | aaaaacaaaa | acaaataagt | actaggagag | ttcaagtccc |
| 64141 | cagtcatccc | catgggatga | ttctcacaca | aataattagc | ctggcactca | aggccctcca |
| 64201 | tgacctgcag | cttctagagt | tctagcttct | agagtcgtta | ttcccttacc | caaaccctcc |
| 64261 | actctgccag | gcaggtctat | aaagttacag | tttgtcctga | gaattagaca | agatgaccgc |
| 64321 | aggggacagg | ctctggatta | gctacgaatt | acaacagtaa | cagcaacgat | aatgatagtc |
| 64381 | tttactatgc | caggatgtaa | gtgacagaga | aaagactaga | aggcattgta | ttgggcagtt |
| 64441 | ttgtttattt | tactttattt | ttttaataaa | attaaaaaat | atatggaact | cttcacaaat |
| 64501 | ttgcatgtca | tcctcgcaca | ggggccatgc | taatctctgt | atcgttccta | ttttattttg |
| 64561 | ttccaatttt | agtatacatg | ctgccgaacc | aagcactggg | cagttttaaa | aatgaagaaa |
| 64621 | tctgaggctc | aggaattagg | tgacYtacgt | gatctagtca | tgtaagtagt | aagttgtcta |
| 64681 | ccttgtccct | atattattct | tttttgtttt | tttctttcaa | gatggagtct | cgctctgtcg |
| 64741 | cccaggttgg | ggtgcagtgc | tgcgatctcc | gctcacYgca | acctctgcct | cccgggttca |
| 64801 | tgtgattctt | gtacctcagc | ctcccgagta | gctgggataa | taggcatgag | ccactgcacc |
| 64861 | cagccagcct | atattattgt | ctacagctgt | taaataggca | atcattgagt | gaatgaataa |
| 64921 | aagctagcac | attctcagca | aatcaaagaa | gccgtgtgct | tttcctcatg | aaaatcaacN |
| 64981 | ttttttNatt | ttttgagaca | gagtttgctt | tgtcgcccag | gctggagtac | aatggcacga |
| 65041 | cctcagctca | ctgcaacctc | cacctgccag | gttcaagcga | ttctcctgcc | tcagcctccc |
| 65101 | gagtagctgg | gattacaggc | gctcgccaac | atgccggtct | aatttttttt | atttttagta |
| 65161 | gagatggcgt | ttcaccatgt | tggccaggct | gggcttgaac | tccttacctc | aggtgatcca |
| 65221 | cctgcctggg | cctcccaaag | tgctgggatt | acaggagtga | gccaccgtgc | caggccgaaa |
| 65281 | atcagcttct | taatcaaaat | aatcaaacag | ctccaatttc | aaaattaatc | actaaagaat |
| 65341 | ttttttctga | ggatccgaga | gctttacaaa | cactRaaggg | ccaaaactcc | tctaaaaaca |
| 65401 | gcaagcacca | agaaaagtct | tgtactagga | gggatgttgg | cagtgtctca | agggttagag |
| 65461 | ggggaggctg | gaaggaaatg | ctggtgctaa | agggaaggac | tgctgtttca | ggagcctgac |
| 65521 | cttgagctta | tttaccatgg | cctcattgtc | cctctccaga | Rgataatggc | tgattaatga |
| 65581 | ggcagtgttg | gtaagtctga | ggcttcctgg | agagaaaagc | agagggcaaa | tcaaaaccca |
| 65641 | gagaggattc | attataacat | ccaacaggcc | cactcagttc | tctctcaaga | aggcctttct |
| 65701 | acaaaacagc | taagaacctc | tccaccctgt | ttcactgtca | cagaggagta | aaatggctct |
| 65761 | gtccctacag | gcaacatatc | aacatatcta | gcacaatgtt | tgctcacaaa | cacagaacta |
| 65821 | attataagaa | atgtgaaaga | acctgaaacg | cagggggaat | actcttactg | gagacagcct |
| 65881 | ccatagtggt | agaaaacata | gtagatctgg | tgttgaaagc | ccctggaggg | gtgatgggtc |
| 65941 | acttactagc | tatgtggctt | aatgcaagtc | acagaggcaa | attactgaga | accaagctag |
| 66001 | ggtcggatca | gctctaaagt | accttttcag | ggccaggcac | agttgctcat | gcttgtaatc |
| 66061 | ccggcacttt | tggaggccaa | gatgggagga | tcacttgagc | caaggaattt | gagaccagcg |
| 66121 | tgggcaacat | agtgagaacc | tgtctaaaaa | aaaaaataat | aataatatat | atatatatat |
| 66181 | atatatagtg | tgtgtgtgtg | tatatatata | tatatatttg | cctattcatc | tatctataga |
| 66241 | tagataaata | aatagatata | tatcaaaaaa | agaaaattgg | ctaggcatgg | cggttatgtg |
| 66301 | tctgtagtcc | tggcaacttg | ggaggctgag | gtgggaggat | cacttgagcc | caggagtttg |
| 66361 | gggttacagt | gagctatgat | catgccactg | cactctagcc | tgggcaacag | agtgagaccc |
| 66421 | tgtctctaaa | aaaataaaat | aaagtacctt | tccacttcca | aaaattccca | tgattctttc |
| 66481 | cacaggatac | cattctcaac | aacaaatctt | gtagtagaac | ttgtctcctc | agaatctggt |
| 66541 | caaaacatca | ctagttaggg | tgttctttca | aaaaaaatag | caaatctcct | agaaacaggc |
| 66601 | acattgtgtg | ttaccctatt | aggacccatc | cccaaagcga | ggcacatgtg | ggtgcttcat |
| 66661 | taatactctg | ttgaaaggag | gaggtccttg | gaaactggta | gtaccaactt | agcatggcat |
| 66721 | acaatgaaag | gtgattggag | ccacactcga | ggaactacaa | ggcagctttt | cataaataaa |
| 66781 | agccacaaaa | tgcaatttat | aactacatct | gtctaaacag | actaaagaaa | agtagctttc |
| 66841 | tatacctagg | tcttcacccc | ttctcctccc | cacctctcta | ctttatcatc | cctgtcctac |
| 66901 | acagcactga | gacccgtctt | tctggttcca | ggtccacttt | tcctttttcc | acaccagaat |
| 66961 | gcctttaatc | actgatagaa | atgaacaaac | atgaatatga | gttctaaaca | ggaagacaga |
| 67021 | tagcctcaag | aaccaacttg | tcaatatgtt | actaataagt | gaaataagtg | ggaatggtgt |
| 67081 | ctaacatggg | catgataaaa | taaaacccta | aaatacatac | tgtgctaggg | atttgaacaa |
| 67141 | acttcaggat | ttttaaggaa | ggctgtgtct | cacatctcaa | ttaatcttcc | caaaagaacc |
| 67201 | ctaagaggca | aggtttattc | caattttata | aattaggaac | gtaaggctca | gtaaaaagaa |
| 67261 | aatacctgcc | tcaaggtcga | ctggtaaggc | tgcagagcca | gaactcaaag | agatgtcttc |
| 67321 | taaatccagt | gctctctcca | gcacatctca | gctacatcct | ctatctttct | catcagtata |
| 67381 | ggtcttcatg | tatacaaagc | atttctgcat | tcattgttca | cactgcttct | gccacagctc |
| 67441 | atgaaaagga | caatgcagat | gtctaaatgg | caccagatct | atacccacct | tttttttttt |
| 67501 | tttttttttg | agacagggtc | ttgctctgtc | acccaggctg | gagtgcagtg | gcaYaatcat |
| 67561 | agctcgctgc | aacctcaaac | ttctgggctc | aagtgatcct | cccgcctcag | ccttacaagt |
| 67621 | agctgctgct | acaacaggca | cgYgccacca | cgcctggcta | tttttaattt | ttagtagcga |
| 67681 | tgaagtctcg | ctatgttgcc | taggctggtc | tcRaacacct | gggctcaagc | gatctgcctg |
| 67741 | cattgacctc | ccaaagtgtt | ggaattaaac | ggtgtgagcc | accgtgctgt | cctatccaca |
| 67801 | cttttaaaga | tgctaataaa | taacgtgatc | accatcagag | aaaataaatc | ctacgtatct |
| 67861 | ggcatcactg | agaagtacaa | aatttcacac | aagcaatttt | cctactaact | gaaatttatc |
| 67921 | ccttttaagg | caaagctctt | tctttatatc | aaaacatatt | ctccaaaata | cataagatat |
| 67981 | gttactcttt | acttagaatt | aatgaaattt | aatcagggat | attcgactat | aaacatgata |
| 68041 | taaacatcct | acatactgtg | ctaggaattc | aaagattttt | tttttttttt | ttgagacaag |
| 68101 | gtctcactct | gctgcccagg | ctggagtgca | gtggtgcaat | ctcagctcac | tgcaacctcc |
| 68161 | acctcccagg | ctcaagtgat | cctccctacc | tcagcctccc | aagtagctgg | ggctaccggt |
| 68221 | gtgcaggacc | atgcccagct | agttttgtac | tttttgtaga | gatggagttt | tgccatttgc |
| 68281 | ccaagctggt | ctcaaactct | tgagctcaag | cgatcagccc | accttggcct | cccaaagtgc |
| 68341 | tgggattaca | agtgtgagcc | actgtgcctg | gcccaagggt | aaatctttaa | acttgagttt |
| 68401 | ataatcttgt | agaggaagag | acacatctgt | aaccataata | tgaagccaaa | gaacatgggc |
| 68461 | ttggggtgtg | ctgaaaggaa | ggtaagataa | cacaagcaag | gctagtgggg | accaacaacc |
| 68521 | cagggtgact | tactgaagag | aagtgggagg | cactgaaaag | tcctgggcag | gagaatggta |
| 68581 | tactacttgt | gctttttgaa | aagatgactc | tagcacaaca | gtgaggccag | aggcagaaaa |
| 68641 | tggacttagg | tggcagcgac | agaggtagag | agaaaactgc | actgccaggg | caggggcagt |
| 68701 | aggaactaaa | acaggtggct | ctgaaaggca | ttacagacgt | agagacaatg | ctcttagcat |
| 68761 | ataggggcgt | gggaaaggtg | gggagctaaa | gagaacacta | agattcttgc | tttcatggaa |
| 68821 | agatttcaga | aYgagaaaat | aagagtaggt | actggtttaa | aggagcgtga | gggactaact |
| 68881 | caggatggga | tgatggggaa | tgctttatag | aggaagtgac | atttaagcta | gatattaaaa |
| 68941 | tatgagcagg | ataagtagag | tttcaccaaa | aagtaaaaaa | gcattctagg | cagagaaaac |
| 69001 | agcacatgca | aagacagacc | atattacagt | tgaacaatgg | catgcagttt | tagggaggtg |
| 69061 | catcagatga | taagaagggt | aataagtaag | gccaggggcg | gtggctcacg | cctgtaatcc |
| 69121 | cagcactttg | ggaggccaag | gcaggtggat | catgaggtca | ggagattgag | accatcctgg |
| 69181 | ccaacatggt | gaaaccccgt | ctctactaaa | aacacaaaaa | ttagctgggt | gtggtcacat |
| 69241 | gcctgtaatc | ccagctactc | aggaggctga | ggcaggagaa | tcatttgaac | ccaggaggtg |
| 69301 | gaggttgcag | tgagccgaga | tcatgccact | gcactccagt | ctggtgtgct | ccagtcagag |
| 69361 | caagactcca | tctcaaaaaa | aaaaacaagg | gtaagtaata | ttaaattgtg | aggcacttgc |
| 69421 | ctcatactaa | gaaattgtag | gtgatgagaa | gacaatcaag | gtttctaaag | gaagagggta |
| 69481 | aaggggagca | gcatgatcag | ggctatgttt | cagaagggaa | actgtataaa | gtacagactg |
| 69541 | gaatggtaag | acacaggagg | aaggcaatag | agcataatgg | ctaagattac | aaggtctgaa |
| 69601 | cttaagacaa | cctaatacaa | attctgggtt | tatagcttaa | tagctctgca | accttgggca |
| 69661 | agttatttac | tctctctgtg | ccctcatttt | ccccagctgt | aaaatgggaa | taataatagt |
| 69721 | actttatcag | gcacaagcca | ccacacctgg | ctattttatt | tttaattttt | gtagagacag |
| 69781 | gatcttgcta | tgttgtccaa | gctggtctcg | aactcctcaa | ctaaagtgaa | gctcccacct |
| 69841 | tgtcctccca | gagcactggg | ataacaggta | tgagccactg | tgcccagccc | atagttccta |
| 69901 | attacgcctt | tttgtatttt | attaatttat | ctttctctta | ctgccttaag | ttccatgaaa |
| 69961 | tcacaaactg | tgtgctcacc | gctgaattct | tagaaatcag | cacaatggct | ggcacagcat |
| 70021 | gagtgcttga | taaatacttc | ttgaatgaat | gaaaggttcc | aaactatata | ttttaaatga |
| 70081 | actctattta | aatgtaacct | ttatatagaa | ccccaggaca | cacagaagaa | gacagtttga |
| 70141 | agtaagggat | atttggagac | ttgttccctc | tgcttccccc | tggKtcttaa | gtcagttcta |
| 70201 | tagttctgta | aagctttaca | gaatgcagtg | caaaaaccat | tgtctgttac | aagcaagaag |
| 70261 | taatgtatgt | ctgaagtaag | gcaatgacaa | taaagatgca | acaatagctt | tgagaactat |
| 70321 | ttatgacagg | ccctgacaac | caattacagt | aggccctctg | tatccatggg | ttccacatgt |
| 70381 | gtggattcaa | ccaacctgag | atgaaaaaca | ttttRgggaa | aaaaaagcat | ctgtactgaa |
| 70441 | gatgtataaa | cttttttttc | ttgtcattat | tctaaacaat | acaatgtaac | aactatttac |
| 70501 | atagtattta | cattgcatta | tataagtaat | ccaaggatga | tttaaactat | acgaaggacg |
| 70561 | tgtgaaggtt | atatgctaat | attataccat | tttatataga | gacttgagca | tccaaggatt |
| 70621 | ttggtatctg | tgtgaagtcc | tggaaccaat | ccccacagat | gctgagggac | aactgtataa |
| 70681 | atgaagaatg | agaaaaggaa | aattcttgaa | gcacctctaa | atttcctagc | ttgagtgaac |
| 70741 | aaataaatga | acatgtgtgc | caaaaagcaa | gataagaatg | taagagtggc | tgggcacggt |
| 70801 | ggctcacgtt | tgtaatccca | gcactttggc | aggtcaaggc | aggtggatcg | cttgaggcca |
| 70861 | ggagttcgag | accagcctgg | ccaacatggt | gaaaccctgt | ctccactaaa | aatacaaaaa |
| 70921 | aattagccgg | gcacggtggc | aggcacctgt | aatcccagct | acgagggagg | ctgaggcagg |
| 70981 | agaattgctc | aaacccagga | ggtggaggtt | gcagttagcc | aagatcacac | aattgcaatc |
| 71041 | caccctggga | aacaagagca | aaactccatc | tcaaaaaaaa | aaaaaatgta | agagtaacaa |
| 71101 | taacaatttc | cattcatttg | aacatagtat | cacccctatc | aagcaaatac | tattaatacc |
| 71161 | ctcaagttat | agaataaatc | tttcacgatg | ttaagcaact | gtcatgatct | tcattagcaa |
| 71221 | agatcatgag | gctaataagt | agcagaatta | agtttcaaat | ccaagactgt | cccactccaa |
| 71281 | gcccaaaatc | taaaccgtct | tgctatattg | gcaagcagtt | tgagagttag | gtcttagacg |
| 71341 | tgagatatct | actggatata | cagttagaaa | taatcagtaa | ctaatgaaaa | atatgatttg |
| 71401 | gggttagaga | taaggatctg | ggctccattt | ggaagactga | ataaattcag | aagagtgtct |
| 71461 | atgagaagat | catgcttgct | tgtaaggcct | gtaaatgggt | gatgtacgca | tttgcgattg |
| 71521 | aagtttgttg | atttaccaag | gtctctgcct | tgcatagatc | tagtgggcat | cRgcattaag |
| 71581 | agaggaagta | aaaaacttta | ggagaaattc | cagatctctg | gggattcctg | ttaggacctt |
| 71641 | tatattattt | ttgttttggg | agaatttaac | agaaagacag | tgacaccaat | gtcaacaaaa |
| 71701 | aaaaatgaga | cagcaaaggt | gataaagaga | aYagatttgg | ggatcatcat | tttctcttct |
| 71761 | gcttgagatt | ccacagctct | caacaaaaat | gactattatt | tgtgtatggc | tctttacaac |
| 71821 | taacaaagtg | tttcccattt | acaaggtatt | tcctgtttac | caataatgtc | agatgaacct |
| 71881 | tacaacagct | gtttaaggtg | agggcattat | tattttcact | ttaccaaaga | ggaatgaagt |
| 71941 | ccagaaaagt | taagtttacc | ttgtctaagg | tcatacagct | aaaaagcaac | cgggccacga |
| 72001 | tgtaaccacg | gttttctggc | tcctaatctg | gggctctttc | cagaagactc | acctgagata |
| 72061 | acatgagcca | ctcacttatg | aaccaagagt | catcatccct | atgtatagtt | tcactgtgtt |
| 72121 | taaaaataaa | acaatagggg | gatagtgact | gggaaggggc | taatggtatg | ctggtaatgt |
| 72181 | tctgtttctt | gatgtaggtg | ctagtaacac | aggtgtgttc | accttgtgga | aagtccttga |
| 72241 | gctgtaaact | ttgtgtactt | ttctgtatat | atgtcatact | gtaattatta | aataccaggc |
| 72301 | aagccaggtc | aggaggcttg | cacttgtaat | cccaatggct | caggaggctg | agatgggagg |
| 72361 | atcacttgag | cccaggaatt | caagaccagc | ctgggtgaca | aagcaagacc | cccatctctc |
| 72421 | aaaaaaaaaa | aaaattcagc | tgggcgcgga | agcttacacc | tgtaatctta | gcactttgag |
| 72481 | aggccgaggc | agacagatta | cctgaggcca | ggagttcgag | atcagcctga | ccaacatggt |
| 72541 | aaaaccacat | ctctactaaa | aatacacata | cacacacaca | cacacacaca | cacacacaca |
| 72601 | caattagcca | ggtgtggtgg | tgcacgccta | taatcccagc | tactcagaag | gctgaggcac |
| 72661 | aagaattgct | tgaacctgga | aggtggaggc | tgcagtgagc | tgagatcata | ccagttcact |
| 72721 | ccagcctggg | tgacagagtg | agactctgtc | tcaagagaaa | caacaacaaa | taaaaaaaaa |
| 72781 | ttagccaggt | atggtggcat | gcctgaagtc | tcagctactc | aggaggctRa | ggcaggagga |
| 72841 | tcacttgagc | tcaggagttt | gaggcttcag | tgagctacga | ttgtgccact | gtaccccagc |
| 72901 | ctgagtgacg | cagcaagatc | ccatctctct | tttttttttt | ttgagttgga | gttttactct |
| 72961 | tgttgcccag | gctagagtgc | agtggtgtga | tcttggctca | ttgcaacctc | cgccttccag |
| 73021 | tttcaagcga | ttctcctgcc | tcaacctgcc | aagtagctgg | gattccaggt | gtctaccacc |
| 73081 | acccccagct | aatttttgta | tttttagtag | ggacagggtt | ttactatgtt | ggccaggctg |
| 73141 | gtcttgaact | cctSaccttg | tgatccgcct | gcctcagcct | cccaaagtgc | tgggattact |
| 73201 | ggcatgagcc | atcgcgcctg | Rccaagatcc | catctcttta | aaaaaaaaaa | aaaaaaaaaa |
| 73261 | aaaaggcaag | ccaaactgat | aatcaaaact | caggaacact | aagttggatg | cgtcacattt |
| 73321 | tttactcaat | ttctcaaaca | gtagctacat | ataggacatc | taccagttat | ataaggatgt |
| 73381 | acaaaattct | tgcacactca | aataacatat | ccacccaatt | gtcccaatcc | agactgtctt |
| 73441 | agtgatgtga | aagaatctga | caggactgga | agtaacagaa | gcccaggaaa | gggcggagat |
| 73501 | ttttgttaat | gaaaacaaaa | atggcattga | aaatggaact | atcctacatc | atcatcaatg |
| 73561 | atgagatatc | tcaatttcag | agataacaaa | aatgtgaaaa | aaaaatggcc | agtgacaatt |
| 73621 | ggaagatact | atcaattgta | aaatacaccc | caatttcagt | gttaaaatat | taaaaaagca |
| 73681 | aaaaaaaaaa | aaagaaagaa | agcattttaa | aacaaaggaa | atatattcta | atctcaaaag |
| 73741 | gtagctcaat | tgtgggataa | cagatttgtg | aagcacatct | ccttgtacaa | gctctttgtt |
| 73801 | ttagagataa | ggacactaaa | gccttcattt | aagttattaa | ataaccttac | taaattaaag |
| 73861 | ctcacacatc | agaaagttga | taactacaat | tacaaagctg | gttccttcaa | tgctcgttct |
| 73921 | cctgccacta | cccagatgcc | tcctttaaat | ccaaaagaag | atttacatat | taattccata |
| 73981 | ttaaaactct | attttgactt | tcatatttct | ttacttcatt | aactcactaa | aaaataataa |
| 74041 | aagttaacct | ttaaaaatca | attaaagctg | ggcgaggtgg | ctcatgccta | taatcccagc |
| 74101 | actttggaag | gctgaggcag | gtggatcact | tgaggtcagg | agttccagac | cagcctggcc |
| 74161 | aacatggtga | aaccccatct | ctactaaaaa | tacaaaaatc | agttgggcat | ggtggcaggc |
| 74221 | gcctgtattc | ccagctactt | gggaggctga | ggcatgagaa | ttgcttgaac | ccgggaggtg |
| 74281 | gaggttgcag | tgagccaaga | ttgcaccact | gtactccagc | ctaagaaaca | gagcgagaca |
| 74341 | ccRtctcaaa | aaaaaacaaa | aaaaaacaaa | aaacaaaaaa | acaaaaaact | aagctgggtg |
| 74401 | cggtggctca | cgcctgtaat | cccagcactt | tgggaggctg | aggcaggtgg | atcgcctgag |
| 74461 | gKcaggagtt | Ygagaacagc | ctggccaaca | tagtgaaacc | ctgtctctat | taaaaaaaaa |
| 74521 | aaaaaatagc | taggcgtggt | agcaggcgcc | tgtaatccca | gctactaggg | aggctgaggc |
| 74581 | agaagaatca | cttgaaccca | ggaggtggag | gttgcagtga | gccaagattg | tgccactgca |
| 74641 | ttacagcctg | ggcaacaaga | gcaaaactac | atctcaaaaa | aaaacataat | aataattaat |
| 74701 | taagatgaaa | cgatgtttag | gaaacttcat | ttcttgctta | tacaagtttg | ttttccttgt |
| 74761 | tcttcaaaac | cagtgaagca | atacaaagtt | agataaaaga | caaaattagt | aatctcccag |
| 74821 | cccctttcca | ttcctctcca | aggcctccta | caagatgaga | aatggtaaca | tatttttgtg |
| 74881 | tcccccaaaa | acataaatac | aaatatattg | gaaagggttt | tgttgttctc | tgtttttaga |
| 74941 | aaactaggtt | taaactttac | acattgctct | gcaacttatc | tcatctaaca | atttatcaac |
| 75001 | atctccccaa | gcatcaataa | ctaaaattct | aactcatact | tttaaaaagc | tacataaaag |
| 75061 | tccatataag | ggatatccat | aacgtgttca | catatttttc | tattgaggga | atggctattt |
| 75121 | tcagtgttac | catttcaaac | aatgctgtaa | tgagtatcct | tgacgtattt | caagttaaag |
| 75181 | aaaaaaaact | atttctacac | acatactttc | cttgttgtcc | catgttttga | ttactcctgg |
| 75241 | tctcatcatc | atccctacct | cccttgctca | gagaatcatc | ctcagggtcc | agtgtgatga |
| 75301 | cagagagcaa | agtaacttgg | agaatgtcaa | gacaagacat | gtgatagtta | ctgttggtaa |
| 75361 | attggaaatg | gcctgtcttg | gctgcctctc | tcagtcactt | gcacatgcta | tccccctcct |
| 75421 | ccccttacat | gtgctccctg | ttctggtctc | agcagctgct | tccaactcaa | ctgatgtgag |
| 75481 | cacagctagc | tacYttgtca | cactcctaaY | cctggcaagt | gcagacaggc | ccaggagctc |
| 75541 | tccaaacaat | tggaaaggag | aaggaataca | ttatcactgt | gaaataatat | aatacggagg |
| 75601 | tatctagagt | aaaatgtaaa | actccctctt | cattaagcct | caacccacat | ttgccagtga |
| 75661 | cactccccag | ctcagaagtg | accactgtta | gaagtctgtt | gtacaacctt | ttggattttt |
| 75721 | cctaagcatg | tacacataca | ggtatatatt | cacatacagg | tatgtgtgtt | tggtctacat |
| 75781 | atctgtaatc | ataccatata | atatgttctg | caacttgccc | ttttcaYgta | Maaatttatt |
| 75841 | tgacatgttt | ccataccagc | aaaaaacaga | ttcctcacat | ttttaattaa | ttttttttga |
| 75901 | gacaaagtct | cactctgtca | cccaggctgg | agtgcagtgg | caccatcatg | gctcactgca |
| 75961 | acctcaacca | cctgggctca | ggtgatcctc | ccacctcagc | ctcctggtag | ctgggactaa |
| 76021 | aggtgcRcac | caccataccc | agctaattta | tttgtagaga | tgggatttca | ccatgttgcc |
| 76081 | caaactgttc | tcaaactcct | aggctcaaac | aatccgccca | ccttgtcctc | ccaaagtgct |
| 76141 | gggattacag | gtgtgagctR | tcatggctgg | caattcctta | aacttttaaa | agcttRaaaa |
| 76201 | aatcctatgt | aagaatgtgc | cacaacttta | ttttcccatt | ttgctacatc | tggacattta |
| 76261 | ggttgttcac | agtgttttgc | atgtcaaaga | atgctgtatt | gataacactg | gcagcacatc |
| 76321 | tctaatttta | cacacaagct | aatatttctc | taggatatat | accaataatt | agaattaWtg |
| 76381 | ggttgaaaag | cttgtgtatt | ttaaatgtca | acagatattc | ccaaattacc | atctaaaact |
| 76441 | gtgtactagt | ttatagtctc | accaacagag | gataaaaatt | cccatctaca | cccttctacc |
| 76501 | aatatatttt | atcaatatat | aagatagaat | atattattgt | tttaatttat | atcttatttc |
| 76561 | cagaaaagtt | aaacatctcc | tcacatatgc | aactgttcat | tcttatttct | tatgaaaggt |
| 76621 | attaccattt | tgattttaaa | catgagggtt | cagagatgct | agagtgacac | aaccagtaag |
| 76681 | tccagacatc | aaagctgttt | ttttaacaat | ttcccatcaa | aactaggcct | ctttctgtca |
| 76741 | agtgtaattc | cccctaccag | cagccagcaa | actatggcct | ataagttagc | agcccatatt |
| 76801 | ttgtaaatca | ggttttacta | aaacgtagcc | acgcccattc | atttaagtat | tgtctatggc |
| 76861 | tgcttttgtt | ctccaatggc | agaggtgagt | agttacaacc | acatggtctg | caaagcctaa |
| 76921 | aatatttact | actggggtct | aaacagaaac | aataacttgc | ctaagcacag | tgactcacac |
| 76981 | ctgtaatccc | agtgctttgg | gaggctgaag | gtggtggact | gcttgctgtt | tgagcccagg |
| 77041 | agttcgagac | caacctgggc | aacatggcga | gattccatct | ctacaaaaat | tagaaaaata |
| 77101 | gccagttgtg | gtggcatgca | cctgtaatcc | cagatactca | ggaggctgag | gtgggaggac |
| 77161 | tgcttgagcc | tgggaggcca | aggccgtggt | gaactgccat | tgtgccacca | cattccagcc |
| 77221 | tggaagacag | agtgagactc | catgtcgaaa | aaacaaaacg | cacacacaca | aaaaaaacaa |
| 77281 | gagttaaaaa | ctaaagaaaa | gctcaRgtct | gggcacagtg | gctcatgcct | gcaatcccag |
| 77341 | tacttaggaa | ggcttagcga | gaccccatct | ctacaaaaaa | taaaaaaaat | taggctaggc |
| 77401 | acggtagccc | acacctgtaa | tcccagcatt | ttgggaggcc | gaggcgggcg | gatcacgagg |
| 77461 | tcaggagaat | cgagactgtc | ctggccaaca | tggtgaaacc | ccatctctac | taaaaataca |
| 77521 | aaaattagct | ggccgtggtg | gcgtgtgcct | gtaatcccag | ctactcagga | ggctgaggca |
| 77581 | ggagatcact | tgaaccaagg | agttggaggc | tgcagtgagc | cgagatcgtg | ccactgcact |
| 77641 | ccagcctggc | gacagagcaa | gactgtctaa | aaaaatttaa | aaaattaaaa | attagccagg |
| 77701 | cacagtgctg | tgtgcctgta | gttccagcta | cttgggaggc | tgaggcagga | ggaccccttg |
| 77761 | aaccaaggag | ttcgaggttg | cagtgagcta | tgatcacacc | acggcactcc | aaaatctggg |
| 77821 | tgatagagca | agaccctgtc | tcaaaacaaa | aaaagaaaag | cttctcagtg | gggattagtt |
| 77881 | atggtctaat | tggccacagc | cagagcatgg | ctatgttaca | gtgtgtggct | cattttcaaa |
| 77941 | taactttata | tgcagtatag | gtctggtata | taatcccaaa | ggaaagagcc | caaaacactc |
| 78001 | aaatgaagtc | aaaagactta | tctttactta | tgggttgcaa | cactaaaaga | ttttctatgc |
| 78061 | actactcttc | gtcttccttg | tttcttttct | tttttttttt | tttttttttt | ttgagacaga |
| 78121 | gcctcattct | gttgcccagg | ctggagtgca | gcggtacaat | cacagtttac | cacagcctca |
| 78181 | acctcccagg | ctcaagcgat | cctccttcct | cagactcctg | agtagctggg | accacaggca |
| 78241 | ggtaccacca | cacctggcta | atttttgtat | tttttgtaga | gacagggcct | tgtcatgttg |
| 78301 | cctaagctca | tctcaaactc | ctgggctcaa | gtaatcctgc | ctctgcctcc | caaagtgctg |
| 78361 | ggattatagg | catgagccac | catgcctggc | cccttattta | atttcatctg | gttcctactg |
| 78421 | tccttcaatg | attttgacaa | tgtagttcct | acccacacac | cacaataata | caaaaccaaa |
| 78481 | gcaaactcca | ctatgtctgc | tgctaaacac | ccccaacaaa | cacacataca | catcacacca |
| 78541 | caccacacaa | cacaacacag | gtgtctcctt | cccttttgct | agcagattcg | ctaggaagca |
| 78601 | gctgcacatt | tccagcaagt | cgaacaaact | gctgagagct | agggcccctg | accattgtgg |
| 78661 | gaaaggaagg | ccaattctcc | cctctagatt | gtacccttct | gaagatcctg | gccatgaaag |
| 78721 | aagtcatttc | tccagagaat | tttaagccat | tcagttccta | tacggcaggc | aggaaaggtg |
| 78781 | tcatcctccc | catatcatca | gtggaggaac | tcagtgtaac | ttgtttcatt | tcctcttact |
| 78841 | tcaaaaSgtc | attttaagta | atagggtcat | ttaggtaata | tcagtgatct | ttttaatttc |
| 78901 | tcctcgcatt | ctctcccMaa | ttttggtttt | acaaaataat | ggttaaaaaa | aaaaagctat |
| 78961 | catactctcc | acgaaattta | acttaatcta | gaattttgaa | tgagaaatta | ataatcaaag |
| 79021 | aacagtgcat | tttaggccag | gcgcggtggc | tcactcctgt | aatcccagca | ctttgggagg |
| 79081 | ccaaggcgag | cagatcacct | gaggtcagga | gtttgaRacc | agcctggcca | acatggtgaa |
| 79141 | accccatctc | tacttaaaat | acaaaaaagt | agctgggtgt | ggtggtacgc | acctgtaatc |
| 79201 | ccagctactt | gggaggctga | ggcaggagaa | tcgcttgaac | ctgggaggtg | gaggttgcag |
| 79261 | tgagccgaga | tcgtgccatt | gcactccaga | ctgggggaca | agagtgagac | ttcgtctcaa |
| 79321 | aaaacaaaca | aagaacagtg | cattttctta | cacaaataag | caggtattaa | gtggttctct |
| 79381 | ggataggaat | ttggcaatac | aaatcaaaat | taatgcctat | aatcctagca | ctttgggagg |
| 79441 | ccaaggtggg | cggatcacct | gaggtcaaga | gtttgaaacc | agcctgacca | acatggagaa |
| 79501 | acccgtctta | aaaaaataca | aaattagctg | ggcgtggtgg | cacatgcctg | tcatcctagc |
| 79561 | tactcgggag | gctgaggcag | gagaatcact | tgaacctgga | acaggtggag | gttgcagtga |
| 79621 | gctgagattg | tgccattgca | ctccagcctg | ggcaacaaga | gcgaaactcc | atctcaaaaa |
| 79681 | caaaacaaaa | ccttgatatt | tgggccaggt | gtggtggtgg | cacatgccca | aaatcccagc |
| 79741 | actttgggag | gctgaggtga | aaggattgct | tgagcccagg | agttcaagac | cagcctgggc |
| 79801 | aacatagtga | Sacctcatct | ctacaaaaaa | taaaaaatta | gcYaggcatg | gtggtgcaca |
| 79861 | cctgtggtcc | cagttactcg | ggaggctgat | gtgagaggat | cacttgaacc | ctgaaaggtt |
| 79921 | gaggctgtgg | tgagctgtga | tcataccact | gcactctagc | ctgggtgaca | gagtgagacc |
| 79981 | ctgtctcaaa | acaaagaaac | aaagaaacaa | aaatgttcat | atttggctgg | gtatggtggc |
| 80041 | tcacacctgc | actttgagag | gccgaggcag | gatgatctct | tgaagtcagg | agttcaagac |
| 80101 | cagcaatctt | ctcgcctcag | cctcccaaag | tgctggtgct | aggatgatgg | gtgtgagcca |
| 80161 | ctgcacccag | cctaagatag | taaattttgt | tacatacatc | ttaccaaaac | tcaaaaaaaa |
| 80221 | aaaaaaaaaa | aaaaagctgg | ctgggtacaa | tggttgaagc | ctgtcatccc | agcactttgg |
| 80281 | gaggccaagg | taggaggatt | gcttgagccc | aggagttcaa | gaccagcctg | ggcaacacag |
| 80341 | tgagaccatg | tctctacaaa | aaatttaaaa | attagccagg | tgtggtggca | tacacctata |
| 80401 | gtcccagcta | ctcaggaggc | taaggtggga | ggatcacttg | agtctgaKcc | tgggaggctg |
| 80461 | aagccataat | aagctgtgat | cataccactg | cactctagcc | tgggcaacag | agtgagatct |
| 80521 | tgtgtcaaaa | aaaaaaaaaa | aagaaacaaa | aagaattaaa | aaaaaaaaaa | tctcatgttc |
| 80581 | tttcatcaaa | taattccaat | cacagaaata | aaagtttagg | aaataatctg | aaatacaaag |
| 80641 | atatatggac | attaatagaa | ttatttatca | ttctgaaaaa | ctgaaggaaa | actaaatatc |
| 80701 | taacaataac | ttaaattatg | gcaagaatat | acatatgatg | aaatcttatg | cagtcactta |
| 80761 | aaatgtttta | aataagtttg | gctgggtaca | gtggctcacg | tctataattc | cagcactttg |
| 80821 | gaaggctgag | gtgggatgat | tgcttaagcc | caggagttca | agaccagcct | gggcaacata |
| 80881 | gtagactcca | cttctacaaa | aaataaaaat | aaaaaaaata | gctgggcatg | atggcatgcg |
| 80941 | cctgtagtYc | agctacttgg | gaagctaaag | cgggaagatc | acttgagccc | aggaggtcaa |
| 81001 | ggctgcagtg | agctaggatt | gcaactgtac | cactgcactc | cagcctgagt | gacagagcaa |
| 81061 | ggccccgtct | ctggggaaaa | aaaaaaaagt | tttaaataat | tttaatgaca | tggggaaata |
| 81121 | ctcaagaaaK | gttgaatttt | aaaagcagga | tataggctgg | gtgcagtggc | atatgcctgt |
| 81181 | aatcccagcc | ctttgggagg | ccaaggcagg | tgaatcgctt | gggctcagga | gttcaagacc |
| 81241 | agcctgggca | acatggtgaa | accctgcctc | tacaaaaaat | acaaaaatta | gccgggcatg |
| 81301 | gtggcatgca | cctgtagtcc | tagctatttg | ggaggctgag | gtaggaggat | tgcttgagcc |
| 81361 | cagaaggttg | aggctgcagt | gagctgtgat | cgtaccactg | cactgaagcc | tgggtgagag |
| 81421 | agtgagaccc | tgtctcaaaa | caaacaaaca | aNaaaaaggc | aggataaaac | tattatggta |
| 81481 | tggccccatt | tttgaaacta | tatatacaaa | tatttataga | cagatagata | tatcatatac |
| 81541 | atatttatcc | ctctccccac | atacttgtga | gtttgtatat | gtgtatgtat | acgtgtaagg |
| 81601 | aagtatacca | aataatgttc | atttctgagt | tgtggaatta | tgggtgcctt | ttactttccc |
| 81661 | ccttaacaca | ttatttttca | tgttttctaa | atagtaccat | catatacaat | taggaaaaaa |
| 81721 | ttactttcat | attgtttaat | ctagtaatct | atttgtagat | atgtatcata | agaaaataac |
| 81781 | caaaaacgta | gacaaaaact | tatgcataat | aatgttcata | taaagataca | cagaaaacta |
| 81841 | ttaataaata | atggttactt | ctgcagggca | gaattagggt | aaagacttat | ttggggactt |
| 81901 | atttgttata | tctattacaa | aaatgatttg | aaaaaaattc | cattattatt | tgaaaaaacc |
| 81961 | tgaaagcata | taaaaatcct | atatgataga | ctattatgca | gccactacaa | atatttatga |
| 82021 | agagtatata | taaatttata | taatgaaaaa | atggtaaatg | gggaaaaaag | cagaatataa |
| 82081 | aattttaggt | aatatatgat | ctggaaattg | caaaaccaga | aatatacaag | cacaaaatac |
| 82141 | tgaaagaaaa | taggctaaaa | taagaacagt | agttttctcc | agatagtggg | attacgggtg |
| 82201 | atttcagttt | tcttccttat | acttctctgc | gtttttcaca | tatcctagaa | tgaatatata |
| 82261 | ctatttttca | atcaggctta | aaaaatgttt | ttggtttctg | ccctataatg | aaaagcctgc |
| 82321 | tccttgtgtg | aaattttatc | cacaaaggat | tatcagtagt | aagcaaccca | ctagcaagaa |
| 82381 | gactgttcat | aatgtatatg | cctaagaaaa | tcatctttgg | tgggtcagtg | agctcagttt |
| 82441 | aaagggacac | agctctgacc | acttcctgcc | ttcttgcttt | tggagttgtt | ttagtaaata |
| 82501 | taactgagga | atcaagttct | caaacatgag | atgcctgaca | aacttaatac | tgtactgtaa |
| 82561 | gaaccaggac | caccaccttc | tctcaaccta | acctYtaaga | ctttacactt | aagaatagac |
| 82621 | aagaccgggc | cgggcgtggt | ggctcatgcc | tgtaatccca | gcactttggg | aggccgaggt |
| 82681 | gggcggatta | cctgaggtca | ggagtttgag | accagcctga | ccaacatgga | gaaaccccat |
| 82741 | ctctactaaa | aatacaaaaa | ttagccgggc | gtggtggcac | atgcctgtat | tcccagctac |
| 82801 | tcgggaggct | gaggcaggag | aatcgcttga | acccaggagg | cgggggttgc | ggtgagccga |
| 82861 | gatcacgcct | atagcctggg | caacaagagc | gaaactctgc | tcaagaaaaa | aaaaaaaaaa |
| 82921 | gaatagacag | gacctaaata | acatagattg | ggtcatgtta | gtctgtaaat | caaaaacact |
| 82981 | taacagctaa | ttacatgaag | aataaaatcc | aaatttctta | gcataacgct | taaggttctc |
| 83041 | taagatccaa | ccctcaaatt | tccttcccag | cctcatcttc | agttcattcc | ctaaaatatc |
| 83101 | ctctacctca | ggcacatttt | ccccatacat | gccaggcatt | ttccaagctg | tgtgcctttg |
| 83161 | cccatggtgt | gacctccatt | aaatgccctg | tctcctaaac | ctactgaact | cctattcttc |
| 83221 | ctttacaacc | tggctcaaat | gccttctccc | aaactctcct | tatcgccccc | accatcagga |
| 83281 | acaattgttc | tttcctctat | gtgctcccat | attgcttgtt | cctctacaaa | cttaattaca |
| 83341 | atcctccctg | ggtggatgct | agctgtaata | cttgtttcat | tttactaaac | tcctggaggg |
| 83401 | cagaaaccat | tttaaaatca | tttccactcc | agcacactgc | ttgcacacag | taggtactaa |
| 83461 | atatgctgcc | tgagtaaatg | acagccaatt | ggcccttatc | tgaattcttt | cagtggtaca |
| 83521 | gccagggatg | gcaaattgtc | aaagctagtc | cctctaattg | caagttatac | atatagcatg |
| 83581 | agtgaccagc | agaaaatgcc | aagggcctgc | cactttaaga | ggactggcaa | gaYgactatg |
| 83641 | tttacacaat | cctaattaaa | actaaagggc | aatgagggaa | agaagagaaa | tagggagatt |
| 83701 | aagaggtgtg | gattctacag | gtcacctcct | cttcttagtg | agcttgctag | gcactaggct |
| 83761 | ggaagatctg | agctacaaag | tagcctattt | tatctttggg | gtagcctgta | ggatctaagt |
| 83821 | attgaaaagc | aactaattag | gccactttgt | cctccagcaa | ctggccctgc | tcttgggcat |
| 83881 | taacttccaa | ctggtacaca | aggctttttc | tctaaatgaa | tcccactgta | ccaatcacta |
| 83941 | ggagaatccc | tttaaaaaag | gcttgaaatt | aataacagca | ggaaacaaag | tctctcaatc |
| 84001 | ctctgaatca | caatatccac | actgtccatt | ttgatgaaat | tcacccccac | ctccttcaaa |
| 84061 | caataggtcc | taccaaggaa | tgacttctct | caggaccaac | atgtcctgtg | attgtttttc |
| 84121 | tggagcaagc | ttccagtgcc | tgcttctcat | taaatagcta | cttaatgtct | gatcacccag |
| 84181 | ctgtgactat | aagtagagag | taaagtaact | ataatttagg | aRgtaaaaaa | gaaattccac |
| 84241 | tcctacccca | agtccagtag | tcaaacagct | tagaatagac | atttccctac | ctcaaacctt |
| 84301 | cttaggctta | tccaattttc | agatctagaa | tttttagcat | ctcttaactc | tttcaatata |
| 84361 | aaaatgagga | aaacaatRtY | tagagtaaga | aagagaattg | caaatgatta | tacagtaact |
| 84421 | tagtcacaga | atcttttgac | caggctgtct | aacacctcat | ttaactgatg | agttttcaag |
| 84481 | accactgttt | ccaggaacag | gttacagggc | actacaatat | aatcagctta | atttgcatat |
| 84541 | attcaagata | acagccccta | ggcttgaccc | cttcaccatc | ttcctgccta | ccttttttca |
| 84601 | aacccacaac | tgctaacaac | aacaaaaaaa | tcaatgtagt | gatttaatac | atcatttctg |
| 84661 | cctaaaaaaa | gactggagct | accaaaccat | ctgcttcagc | ctcaccacct | gggattcatc |
| 84721 | ttgattgatt | tgggtgtgtt | ggtgggcagt | ggctgccaca | gcctgaagaa | ctcttccaac |
| 84781 | tctttctggg | ggtcttctgg | agatgggact | gcaatggctc | ctcagctgca | gtttcctata |
| 84841 | gagcaacatg | ttgaaacaca | cttgttccct | caacacactt | gtgtttcagc | cctcaacaca |
| 84901 | cttgtgattt | gggaggagta | ccaggagaaa | gaccagtttt | tggcagggcg | cggtggctca |
| 84961 | cgcctgtaat | cctagcactt | tgggcggcca | aggcgggtgg | atcgcttgag | gtcaggagtt |
| 85021 | caagaccagc | ctgaccaaca | tggtgaaacc | ctgtctctac | taaaaataca | aaaaattagc |
| 85081 | tgggcatggt | ggcacatgcc | tgtaatcata | gctactaggg | aggctgaggc | aggagaatcg |
| 85141 | cttgaacccg | agaggtggag | gttgcagtga | gctgagatcc | cgccattgca | ctccagtctg |
| 85201 | ggtgacagag | agagaccctg | tctggRaaaa | aaaaagaaaa | gaaaggccag | ttttctccat |
| 85261 | tatctagtca | ccccaaccta | taagcaagca | tatgcacagt | cactataaag | gaaagtgact |
| 85321 | tgttttccag | cagacatttc | taatcttatt | aaatcaaatg | aaaactgcaa | tcaaaatact |
| 85381 | ctccttagga | agttatttac | ttattctaac | aaaacacttc | tttgggagct | gcctttaaag |
| 85441 | tctactccat | gtgagacaaa | cagaaaaatt | cggtgttact | gttttatagt | cacacctcat |
| 85501 | ccttcaccaa | aaaaggtatt | gccttgcatg | aatctttggc | tcacggcatc | ttctggctgt |
| 85561 | ttctaaaaat | tgaatccacc | aagctaagag | taaagatttg | ctacctctga | ggatattcaa |
| 85621 | aagattggct | cagaggcagt | ctgaggcaat | gacaccatca | ccaaaggaaa | tctaaaggct |
| 85681 | gagaacacaa | ttactttgaa | ggggtcaaac | ttaaaaacat | tctaattgcc | ccataattac |
| 85741 | aatcaagggg | gcaagacatg | tacaatatct | gtcacatttg | ttcaactatt | atatcacttt |
| 85801 | ataattacac | attaYataat | gataaatttt | ggccctggaa | gaaatcttca | agatcatata |
| 85861 | atcctaactg | tcccttttta | catatgagaa | aagttcagtc | cattgaggtt | aggcaatttg |
| 85921 | tccctggtca | cacatctggt | tagcaacagt | caggatgaga | aacccagaca | cccaaactcc |
| 85981 | cagcataatg | cacccacaca | tacttatgta | tacagctcct | cctcccctgc | ttctcacttc |
| 86041 | cttcactccc | ctgatcaaaa | gggacagaaa | taacttggga | cactaaagca | caccaagaat |
| 86101 | ggttctgaaa | cccagtagca | gagaaatgat | ggcttaaaaa | ccaggacttc | tctgcagtgg |
| 86161 | cctcaatggc | caatgtttag | tgtctggctc | acaagagttc | tgggcaatct | acctcagagc |
| 86221 | aagggccaat | gaaaacctct | ggacaccacc | ctcccacagt | tagaaaaata | tctttattaa |
| 86281 | acctctctgc | tctcctccta | cagtaacctg | tttgcctcaa | ataattgaaa | gacaaagaca |
| 86341 | atcactttga | agaatctggg | tcagggaaaa | agtaaatggt | agagatcctg | ctcaggacaa |
| 86401 | agctgaccta | tSaaaaacta | gagggcagaa | accattttga | cttacctcct | ggtggaagcc |
| 86461 | tccacacact | agaacagggt | gatctccagc | agtctggctt | agaattagtt | tccacctagg |
| 86521 | gaaggggcaa | agggacagga | atgattattc | attcccctaa | cccacccact | cttagtgagc |
| 86581 | tcagcctcac | attatcctgg | gcaaccccag | cgttctgtgg | atcagacagc | aagcagaagg |
| 86641 | gaagccatgc | aggccaggtc | aacggggtga | gtcagtggca | gagcaggaag | agtcactggg |
| 86701 | gcagaaattc | tggccttctg | tggcaagact | gccaagccac | acccacactt | ggtcagcact |
| 86761 | gtgaaggccc | tgccctgtta | ggatttcagt | ctttaagcca | gaaaRcttct | tcctcaggag |
| 86821 | gccccacacc | actctcattt | tcaagtgtct | ctcctcctgc | tcaaaaatct | tccagttttc |
| 86881 | ttctccctaa | agcatcatat | ctaaattctt | tggcttaact | ttccaaatcc | tccattatat |
| 86941 | ggcctcaagt | catttattca | accttatttc | ccactattct | acagaatata | ctctgaattg |
| 87001 | atcaagccag | tcttcccact | tctctctgcg | tgagccaagc | cttttctcat | ttccctgctt |
| 87061 | tcaattatcc | aggagtggta | aattcaaaca | tcttcagggg | tcaggcaggt | aacagaaaca |
| 87121 | aattatccag | gcaaggccca | gtggctcaca | gcggtaatcc | cagcactttg | ggaagccaag |
| 87181 | gtgggcagat | cgcttgagct | caggagttcc | agaccaacct | gggcaacata | gtaaaactcc |
| 87241 | gtctctacaa | aaatacaaaa | aattagcYag | gtgtggtgga | gtgtgcctgg | gtcccaccca |
| 87301 | cttgggaggc | tgcagtgagc | tgagaccgtg | ccactggact | ccagcctggg | caacagagcg |
| 87361 | aaaccacgta | tccaaacaaa | acaaaatgaa | tgatccagtg | gggcacatgg | cagatctagg |
| 87421 | aaacgctgca | cccccctaaa | ggcattcaaa | tattttaatt | caaatattta | tgtagtgtct |
| 87481 | cactgtgagc | atcacgataa | ccttttaaat | agttattaat | actctatctt | gcaaatgaga |
| 87541 | aaacttcccc | aaggttaggt | aactggcaaa | atgctgggca | cagtctctag | acctgtctga |
| 87601 | tgccaaagca | agagctctac | accattaggc | ttctagcagt | gcaaacacca | tggaagatac |
| 87661 | agaaccctca | aagtcacttt | tcatgataca | caaccttaat | agtaggatgg | gaagcccaaa |
| 87721 | tcacagctta | tctaaccata | tcccaactgc | ctccaattct | gttcattttc | caaaccccat |
| 87781 | ctttctgcca | aagtatttca | ttcctagtta | tccaagtcct | actgaattcc | ttcttctgta |
| 87841 | aattcctata | gggtttatag | attagacaac | acaaataagt | gctaaattat | atactgtctt |
| 87901 | gcaaaatcag | atactgcttc | tatgtatttt | agtgtcagcc | tcatcaatca | aactattgta |
| 87961 | ttaatctata | tagttcttct | accaaaaatg | cctaacctga | atctaatcaa | gaagaatcag |
| 88021 | acaaatgcta | tgaaagacaa | aaaggcattc | agattaaaaa | agaactgttc | aaagttaaag |
| 88081 | cagactaaag | acatgatagt | catgacaact | aagtgcataa | atacatgcat | gatccttcaa |
| 88141 | tgaatcctga | attttaaaaa | actcaataaa | agacatcact | gggaaaagat | gagaaatctg |
| 88201 | aacaagtatt | atatactgga | tgtattgaat | caatgttaag | tttcctgagt | gttaatagta |
| 88261 | ctgtagttat | ataggaagat | acctttttct | taggaaatac | ttgctgaaat | agggattaaa |
| 88321 | taacatgata | tttacatcta | acagtcaaaa | agattcagaa | aatgaaggaY | aaatagacag |
| 88381 | caaatttggc | aaaatgttaa | tagtgactct | aaatgagaag | tatataagta | tttgttacat |
| 88441 | tattttgcaa | aatatctata | ggtttgaaaa | ttttcaaaat | aaaataattt | agtaaggagg |
| 88501 | gaaatcctgt | attatatact | tttttatata | ctcagctctg | tgacagatat | aataggcact |
| 88561 | cattacttta | ggtatctgct | cactacctaa | ggaaactggg | catttggagg | tcaRcaatca |
| 88621 | gacagagtcc | actttgctgc | agctcatgag | gggtatagta | ggaaattctt | agggaataag |
| 88681 | aggtttctcc | aaaactcaca | ttgtcacacc | acaggaaatc | tagaaaagca | ggcaattacc |
| 88741 | tcactcctca | ttgaggccat | cacagaagta | caggcactga | acaaatgccc | actcgctagg |
| 88801 | cagaatgcag | ctgctgccca | cacgttagta | cccagtggta | aggtggatac | aatgtgacct |
| 88861 | cagaggacca | agagttgagg | tcacattgca | tccaccttgc | caccgggtac | caaaaatttg |
| 88921 | acaatctgca | aaacaagtgt | ctctggccag | tcacaggaag | gcactcaagt | atcaaataaa |
| 88981 | catgcctgaa | atatatgcag | tctttcctcc | tcaccagata | aaccagtcct | cagctgcaat |
| 89041 | aaggcagaag | aaatctgcaa | ggctgaatca | ctggtatttc | ctgtgcagac | ttcaaagaaa |
| 89101 | ctggcccttc | aataggacag | aaagggcagg | cgacacagct | gccaacagag | gcctcaaccc |
| 89161 | aggagcatgc | tatgcaataa | tgccttctct | cccttctaca | gccatcagat | acctcatttt |
| 89221 | taYttctgcc | aaatggcccc | ttattaccgc | gactgattac | ctaatagcca | accctttacc |
| 89281 | ttggttctct | cctcccctca | atgagaccca | agatactggc | ctttctagac | agctcctcct |
| 89341 | ccaatttgcc | agaggaattg | tcaaaactat | tcccctggcc | aggcRcggtg | gctcacgcct |
| 89401 | gtaatcccag | cactttggga | ggccaaggcg | ggcggatcac | actgtcagga | gatagagacc |
| 89461 | acggtgaaac | cccgtctcta | ctaaagatac | aaaaaattaS | cYgggcgcgg | tggcgggtgc |
| 89521 | ctgtagtccc | agctactcgg | gaggggaggc | tgaggcagga | gaatggcgtg | aacctgggag |
| 89581 | gcggagcttg | cagtgagccg | agatcgcgcc | actgcactca | agcctgggtg | acacagagcg |
| 89641 | agactccgtc | tcaaaaaaaa | aaaaaaaaaa | aagctgccta | ggccaggcac | aatggcttac |
| 89701 | acccataaac | ctagcacttt | gcgaggccga | ggcaggagga | ttgcttgagc | tcaggtgttc |
| 89761 | aagactagcc | tgagcaacac | agcaagacct | tgtctctact | aaaaatcaaa | aaaattagcc |
| 89821 | gggtgtagtc | ccagctacac | tacttaggag | gctgaggtgg | gaagacagcc | actgcactcc |
| 89881 | agcctgggtg | acagagcgag | accctgtctc | aaaaaaaaaa | aaaaaaaaSt | tgcccacagt |
| 89941 | aggaggtaga | ggagaggcca | ttattaagca | cactctcagt | aaaccatgaa | tctgacagag |
| 90001 | ctacccaaaa | catcaatgca | gtcttaagct | gcattagtag | aagatgactc | tatgccccac |
| 90061 | ctttgaagag | caaagttaga | ggacttgcag | aggaagaaca | ccaatgacca | tggcaaaggg |
| 90121 | tctagaagta | tatcatttca | aatatggagg | aagaactaca | cacttttagc | caggggagaa |
| 90181 | caagaaaact | tttttcaaat | atacgcatag | ctttcacata | gatgaggaga | aagacttatg |
| 90241 | agtccactat | aagaatacaa | aaccagaact | aatgagtgga | agttacagga | agactgattt |
| 90301 | tggtttgcca | cagggaagaa | atttcagcat | gttgtagaag | ttcagaatgt | gggatgtaga |
| 90361 | acccagaatg | cttggattag | gatgtcaact | ccaccactta | taaactgtgt | ggctttgggg |
| 90421 | agattaatct | acctgtgcct | cagttgcctt | ccctgtaaaa | gagaatagta | ataatagaac |
| 90481 | ttagctcaca | gagctttaag | aagtagcttc | cgagRctggc | tgcggtggat | caggcctgta |
| 90541 | atcccagcac | tttgggaggc | tgaggcaggt | ggatcacctg | aggtcaggag | ttcaagacca |
| 90601 | gactggccaa | catggggaaa | cccgtctcta | ctaaaaatac | aaaaaaaatt | agctaggcKt |
| 90661 | ggtggcgcat | gcctgtaatc | ccagctactc | aggaggataa | ggcaggagaa | tcgcttgaac |
| 90721 | ccaggaggca | gaggttgcag | tgagccaaga | tcacgccatt | gcactccagc | ctgggcacca |
| 90781 | ggagcgaaac | tccatctcaa | aaaaaattaa | ccagacggta | gtggtgtgcg | cctgtaatcc |
| 90841 | cagttactcg | ggaggctgag | gcaggagaat | catttgaacc | tgggaggtgg | aagttgcagt |
| 90901 | gagcagaaat | cacMccactg | tactccagtc | tgggtgatag | agagaggctc | catctcaaaa |
| 90961 | aaaataaaaa | gaagtagttt | ctgtaaagta | cttagaacag | tgcctagttc | acaatatacg |
| 91021 | ctggaaaaaa | aatgttacct | attgctatta | ctaaatgttg | atacaacaga | ccaggctggg |
| 91081 | tgtggtggtt | tgtgcttgta | atcccagcac | tttgagagaa | ctgcttgagc | tcaagagttt |
| 91141 | gagaccagcc | tgggcaacat | agtgagacct | cgtctctact | aaaaataaaa | agagttgcca |
| 91201 | ggcacagtgg | cgtgcacttg | tagttccagc | tactcagcag | gctgaggtgg | gaggatagct |
| 91261 | tgagtccagg | agatcgaggc | tgcagtgagc | tatgatgacg | ccactgcact | ccagccagag |
| 91321 | tgacagagca | agactctgtc | tcaaaataac | aaacaggctg | ggtgcaatgg | ctcacgcctg |
| 91381 | taatcccagc | actttgggag | gctgaggcgg | gtggatcacc | tgaggtcagg | agttcgagac |
| 91441 | cagcctgggc | aacatggtca | aaccctgtct | ctactaaaaa | tacaaaaatt | agctggttgc |
| 91501 | agtggcacgt | gcctgtaatc | ccagctactt | gggaggctga | gacaggagaa | tcacttgagc |
| 91561 | ccgagaggcg | gaggttgcag | tgagccaaga | ctgYgcaatt | gcMctccagc | ctgggcgaca |
| 91621 | gagtgagact | ccatctcaaa | ataaataaat | aaataaataa | ataaataaaa | taaaaataat |
| 91681 | atacaataca | aaaaacagac | cagataacct | gaagcccttc | ctactaaata | tgcctagaag |
| 91741 | tgctcagaaa | aatataataa | acatccttYt | agactgtgcc | agctattaag | gtattgtctc |
| 91801 | tcagctccaa | atctaccctg | ttatgctccg | ctttgtgatg | ctggggcctg | gactccacta |
| 91861 | aaccccattt | cacatttgcc | agctggatcc | ctgtcaacag | ggggtgctaa | ggggaaaaca |
| 91921 | gaagacaaga | gaaggctaca | agggacttcc | tccttcttgt | agcctggtgt | ttcttgacaa |
| 91981 | cagaagttgg | ttcttcccag | ttgcYttcta | aactcccaaa | accagcctcc | tgcccctcaa |
| 92041 | aggcaccagc | atcagctaag | taaggctcaa | cagaagccag | ctcctccagg | ttcctcctat |
| 92101 | aagggcctga | gaaaccagca | gcaccaggta | acaccctctc | cagagaatct | gggtacagct |
| 92161 | attccagatc | cctctagact | tctaggttct | ggtagcccca | accttcctcc | ctttgttttt |
| 92221 | cagtcctgga | tgagaaaaat | tctttatgca | gttattatat | tgaagttact | ttaatattcc |
| 92281 | ctttctgctt | tttcagccct | ccaccaaggg | tttaaatcaa | tctcctttat | ggagttcact |
| 92341 | ctattgtgtg | gtttctgttt | tgctgattgg | atctgaactg | acatatagat | aaactgagct |
| 92401 | ctcaagaaag | taagaaaaat | ccccaggaac | cagaaacaaa | ttagtgagga | ggattagcga |
| 92461 | gctgatgaca | tagctgtcct | agccgtgtat | ggaatttgta | acaccctcat | aggttcagaa |
| 92521 | gacagatctt | gagtccacaa | aaggcactga | gatccctgtg | cagaggctga | gattcttaag |
| 92581 | tttatactca | gtaagataat | agactaggaa | aaaaaatctg | tccagagaga | aataaaaaac |
| 92641 | ttgccttgct | cacctagtga | gaaaggaggg | aaaaaccgtc | taggaattca | aaacaggctg |
| 92701 | ggtgaagtgg | ctcacgccag | taatcccagc | acattgggag | gctgaggtgg | gtggattgct |
| 92761 | tgagcccagg | agttcgagac | cagcccgggc | aacatggcaa | aaccctgtct | ctacagaaaa |
| 92821 | tataaaaatt | tgccgggtat | ggtggtgtgc | acctgtagtc | ccagctactt | gggaggctga |
| 92881 | ggtgggcgga | ctgcttgagc | ccaggaggca | gaggttgcag | tgagccaaga | tcctgcaact |
| 92941 | gcactccaac | ctgggcaaca | aagccagaca | gatcctatct | caaaaaataa | aataaaataa |
| 93001 | aataaaattc | taggaagcag | acattaatat | gtagtgaaaa | acaaacaaac | gatcagtggt |
| 93061 | tcctggtatc | agggtgaaag | gaaaaacgga | ctgtaaagaa | gtatgagagc | cgggcacggt |
| 93121 | ggctcacgcc | tgtaatccca | gcactttggg | aggccgagga | gggcagatta | cctgaggttg |
| 93181 | gcagttcaag | atcagcctga | ccaacatggt | gaaaccccat | ttctattaaa | aatacaaaat |
| 93241 | tagctgggca | tggtggtgca | tgcctgtaat | cccagctact | caggaggctg | aggcaggaga |
| 93301 | atcgcttgaa | cccaggaggc | agaggttgca | gggaSccgag | attgcaccac | tggactccag |
| 93361 | cctggagaat | aagagtaaaa | tccatcttaa | aaaaaaaaaa | gcatgagaaa | tcttttgggg |
| 93421 | gtgagagaaa | tcctctgtat | ctKgattatg | gctgctgttt | acaggtgtag | acatctgcca |
| 93481 | aaactcaact | ttcttgaaaa | ttattacaga | cacaaaattg | aaaacatgag | acaaaaacaa |
| 93541 | gatcacgaaa | aacaagcaga | tttgaaaatg | aaccaaagag | cacttctaat | aaatgaaaaa |
| 93601 | gttagctaat | aaaaataaga | attcaaaaaa | caaattagac | ctagctgaag | agtaaactag |
| 93661 | tatactagaa | gatagatata | aggaaattat | ccagaagtta | acacagaaag | atagaaatgg |
| 93721 | aaattatgaa | agaaagaata | agatgtagac | Racagaatga | ggaagttcaa | cataMgttac |
| 93781 | gcatgagatc | tgagagaggt | aaagaggtaa | tgattgggaa | tttttacaca | attagtgaaa |
| 93841 | agatatgaaa | tttcagatta | aggaattact | atatgccccc | agtatatagt | gatttaagaa |
| 93901 | aattaaattc | acaccatgta | atggaagtac | agaacacaaa | tgacagcaaa | gaagatctta |
| 93961 | aaaacaaaca | gaaagaaaga | caggttaccc | acaataaaat | aagttaattt | gcaagcatag |
| 94021 | ttctcaagag | taacaacaaa | aagccagaat | ttcaatgaaa | aaacactttc | aaagtgctaa |
| 94081 | gagacaataa | ttggaagcct | agtacccagc | taaactacca | atcaagactg | aaagtgagct |
| 94141 | gggcacagtg | gctcatgcct | ataatcccag | cactctgaga | ggccgaggcg | ggaggatcac |
| 94201 | aaggtcaggg | gatcgagacc | atcatggcta | acacaatgaa | accctgtctc | tactaaaaat |
| 94261 | acaaaaaatt | agccaggcgt | ggttgcgggc | gcctgtagtc | ccagctactc | gggaggctga |
| 94321 | ggcaggagaa | tggtgtgaac | ctgggaggcg | Kagcttgcag | tgagccgaga | ctgtgccact |
| 94381 | gcactccagc | ctgggcaaca | gagtgagact | ccatctcaaa | aaaaaaaaaa | aaacaaaaaa |
| 94441 | ctgaaagtga | aataaagatt | ttttaaatga | agacagtgtt | taccactaac | agattcccac |
| 94501 | tggacaaaca | tctgaaggat | gtatgtatct | atgcaataaa | aaaggaagga | ataaaatgca |
| 94561 | aggaaaaata | gtgaaaaagc | aaacagtaga | catacatggg | taaaatgaaa | taatcactaa |
| 94621 | caatacaaaa | caataaacat | attttaattg | tgttggggtc | tcactctgtt | gcccaggcta |
| 94681 | gctaagaact | cctgggctca | agccattctc | ccgcctgctc | ctcctgcctc | agcctccaga |
| 94741 | gtagttggga | tgacagggca | agccaccatg | cccagctaca | aaataataat | tatcaattag |
| 94801 | aattgttcaR | cttagagatg | gattgacttt | gggaatgatc | tcattctaga | aagtaYtcat |
| 94861 | tttgagtctg | gacaacacct | tttggtatgt | ttagtgtaca | ctgggtaaga | ggctaaatta |
| 94921 | aatgaccaca | ccatatatta | ggttaatgca | aaagtaactg | tggtttttgc | cattactttc |
| 94981 | aatggcaata | actgcaatta | cttttgcaca | aacctaatat | cttctgatca | tagttttatc |
| 95041 | aattagacac | agctgtccaa | acagcccctg | atcagctctg | ttcagccacc | tgagcagggc |
| 95101 | tttgccctca | tcctaaaagt | tctagaattc | aagtcttatt | tcaaggcatt | cttcccactt |
| 95161 | ccatgttcca | catgtaaaaa | agaattctac | gtttcttaac | gagctttcag | gtaagatctt |
| 95221 | taagcttttg | gaatgtaccg | cttttcgctg | tgaactaaga | gcttagacat | tacaattagt |
| 95281 | catcccttgc | tagaacttag | gctacgaaaa | gaatactttg | gaagctttca | caaaaaagta |
| 95341 | tgtggttctt | cctctaaaga | agaaaatacc | acacagaaag | agggactgag | gaaacataaa |
| 95401 | cccatctgtg | ctgacagaaa | gctaccttac | atgatcctca | tgttcgcccc | aggttcccat |
| 95461 | atattcacag | cagtaaagat | ctccacaaag | cagagaggcc | caactccctt | accattaaag |
| 95521 | ctttaacgac | cagacaaccc | agaagtttgg | aaacatagaa | ccaggcaaca | gatactagag |
| 95581 | agagggaatt | atgtattaaa | gcaagaaaat | atcatcacgt | tttcaagagg | gagtgccatt |
| 95641 | ccagtaaaga | ggacagctta | atactgaggt | tcaaatgcca | ctaaatgaaa | acgggaaagc |
| 95701 | gaaattcctg | tgccctttca | gcccaagaaa | ttattccaaa | gcatacattt | attcccatta |
| 95761 | catgtcgcaa | atcctgccta | gccattagga | tacagtgacg | aaaaagtctc | tcgttatcta |
| 95821 | gaagggcaga | caaacacgca | gacttttaaa | ataccagatg | gcaggccggg | cgtgatggct |
| 95881 | cacgcctgta | atNccaagca | ctttgggaag | ccgaggcggg | cggatcacga | ggtcaagagt |
| 95941 | tcaagaccgg | cctggccaag | atggtgaaac | cctgtgtcta | ctaaaaatac | aaaagttagc |
| 96001 | cgggtgtggt | agcgggcgcc | tgtaatccca | gctactcggg | aggctgaggc | agggaactgt |
| 96061 | ttgaacccgg | gtggcagagg | ttgcagtgag | ccgagatcgc | gccactgcac | tccggcctgg |
| 96121 | gcgatagggc | gagactccgt | ctcaaaaaaa | aaaaaaaatg | acaagtgcta | actcagaggt |
| 96181 | aagcaaaaga | gagtacccag | aggcggcagc | atcaacccag | tgggctcccg | cccacccaca |
| 96241 | atcttcacac | agtcacacca | cttatagtca | taaatttgta | ctctccgagg | tgcgtgtatg |
| 96301 | aaacatgtta | tctgtgagag | tccatggatg | aaaaacaaaa | acaaacaaaa | attaaaaaaa |
| 96361 | aaaaaaaaaa | agacttaacc | tgttttgacc | aggacaacca | ccccaggaag | taggtaaggc |
| 96421 | aggtaaggtc | attgtttaca | tatatgaaaa | gtgaggctca | aaatacactg | accagtccaa |
| 96481 | gacaacgcgc | gcccccacaM | agcaccttcc | ccgtccccat | ttatgcccaa | cccataaacc |
| 96541 | caaagtagag | ccaacctcgc | actggctacg | taacccgggc | caagctaaac | attataaacc |
| 96601 | tcaggctccc | catctttaaa | gtataacagg | tggttagaag | attaaaaaga | taaacatttg |
| 96661 | gcaggtcatt | gtggacggtg | tagctcagaa | aatgctgact | actgcactac | cataactact |
| 96721 | gctattgtta | acgataaaag | gcaaagactt | tccaggaccc | gacccctcgc | ttacaagcct |
| 96781 | ttcgggaact | tgccctatac | ccccgacccc | agtcaccttc | agatttaatt | ccacagacac |
| 96841 | gcccccaaac | agaccctccc | ctttaaggca | cccccccccc | ccccggctcc | tccctctcag |
| 96901 | gcgcctctcc | tcacaaacct | tacccccata | gattctgccc | tttcggactc | ggttatggag |
| 96961 | gaggccttcc | gctcgcagcg | gcctctccag | cacccctttt | aggcctgagc | acccgcaggg |
| 97021 | gtgcccaggc | cgcacgccaa | acgcgggccc | gcgccggtta | cctggctgcg | cgctcccgct |
| 97081 | ctgcctcgcg | attctccgga | atcgtacctc | ttcgtgggct | cgcgccagcg | ctgtgagcgc |
| 97141 | acaattagtt | taaactatgg | ccccgccccc | tcgcgctgcc | ctctgattgg | cctctgtcgg |
| 97201 | cggggcccgc | ttaaggaccc | gggaaaagga | agtttgaggg | ccactgggaa | agagaagggg |
| 97261 | tatcaccgct | tccggacccc | ggcctgtact | tgaaggcaaa | gagaactaca | aatcccagcg |
| 97321 | tcacccgcgg | ccttgaagcc | ccgcccctga | caaactgaag | gtcccggtaa | gcatcgcgtc |
| 97381 | agtacttatg | gcgcctgccg | ggttgtggtg | acgaaagcag | ttgccatgga | gttgctctga |
| 97441 | gtaaccctga | ggcagtggga | cgccaagact | ggagaggaag | cgactgcggg | tgagtcgggc |
| 97501 | gggaaaacag | gaaacccgtt | ctaggggaca | agagatctat | ggagaaggga | ggggcactca |
| 97561 | cagaacgact | aagaaccttc | ctgctcSggg | atctgagatt | tcccccaccg | accctcatca |
| 97621 | cctttcacRg | cgaacaagat | acaacactca | catgggacag | actgggcgag | ggggagcaga |
| 97681 | gggagggata | ggcgttgaga | tataYatcca | tacagatttg | gggatgctta | agaaccaccc |
| 97741 | ccagggccgg | gagcggtggc | tcacgcctgt | aatcccaaca | ctgggagacc | aaggcgggcg |
| 97801 | gaccacttaa | ggccaggagt | tcgagaccag | cctgagaaac | atggcgaacc | ctgtctctac |
| 97861 | caaaaacata | aaaaaattag | ccgggcttgg | tggcgcgctc | cagtggcccc | agctactagg |
| 97921 | gaggctgagg | tagaaggatc | gcttgagccc | ggagattgaa | gctgcaRtga | gccgtgatca |
| 97981 | cgcaactaca | ctccagcctg | ggctatagag | cgatacctcc | atctcaaaac | aaaacaaaac |
| 98041 | gaaacaaaac | aaaaacaaaa | caaaacaacg | aaccccgccc | ccaacgcaaa | cataaagctc |
| 98101 | ccaaaatcgg | atgcttcaag | ttccaRgcat | aacctgggag | atcagaaacg | ccctcagaaa |
| 98161 | tggggttggt | tttcctctga | ggaactgaga | ccctcttcca | agacatgcgg | ttagcattag |
| 98221 | attgagtaaa | tcgcagtcgc | taccctaatt | ctagagatgt | aggaaacttc | ctggggcgtg |
| 98281 | aagtgcctca | ttccttcttc | ttccaaggag | taaaacccct | tctcaatctg | tccccagatt |
| 98341 | cccttttctc | cccacacctt | ctccgtggtc | cgctactcaa | agctctacag | ttagagcttc |
| 98401 | atttttttta | gtactcacga | cRgatctatt | acatttagta | acctacccag | tgctttcaca |
| 98461 | gtctctcttt | tgatactctt | aacagctctg | tgagtcaagg | atatttatct | tcatttcaca |
| 98521 | gattggaaaa | ctgaaaccca | gagaaaaggg | acttgcccaa | ggccacacac | caaattagtg |
| 98581 | acagagctag | aactagactc | cagttctccg | acttccagct | aagtctcttt | agcttcagcc |
| 98641 | tactgcctct | atagcggaag | gacttgttcc | aaggaacaag | ttaaactgcc | ccagggaaaa |
| 98701 | ggaacctgtg | tggcctactt | tgtattattt | acacttcagc | tggaatgaat | ttcagatcct |
| 98761 | cccctgaaaS | ttttaatggg | gaaaaggaac | tagagagact | aagacaatga | gacttgaaca |
| 98821 | tttttaacta | aacaggaaac | agaagggcta | acacagcacc | catgtctgaa | gtgaccatga |
| 98881 | ttagctggtt | tctagctggt | gactagctgg | ccctgactgg | tccacttact | accttaaagt |
| 98941 | tctcccaggt | ttggtcctac | gccctcttgc | cactgcactc | tatattctct | tcttgggtac |
| 99001 | ccctccacac | ccacaacttc | attttccacc | tgtatgcaaa | tgtacacaag | tgtgtatctc |
| 99061 | aagcccagcc | ctcatctcta | agctccagat | ctatatagcc | aattgcctca | acatctcctt |
| 99121 | taggatacct | caaaggcaac | ccaaactcta | catttctgaa | attgaaacaa | tctctgtgta |
| 99181 | tcccaacctt | ttcctccaag | cctggatctc | ttccagtgct | cctaccttta | tccacaatat |
| 99241 | acccaagccc | aaaacccaag | ttagtacctc | ttccatttac | ttaatacctc | ttccatttcc |
| 99301 | catctatcac | taagtcttat | cagctttact | tcctgaatat | cttttatata | ggtcctagct |
| 99361 | accatcacat | ccttcctgcc | ttccctccca | gccatatttg | cgcactgcaa | ccagagtgat |
| 99421 | ccttcaaaat | gcaaagctga | tactRttcac | tctctacccc | acccccMatt | tttttttttt |
| 99481 | ctttttgaga | cagagtttcg | ctcttgctgc | ccaggctgga | gtgcaatggc | gcaatctcgg |
| 99541 | ctcacagcaa | cctccacctc | ccggtttcaa | gcaattctcc | tgtctcagcc | tcccaggtaa |
| 99601 | ctgggattac | aggcatgcgc | caccacaccc | ggctaatttt | atatttttag | tagagacggg |
| 99661 | gtttctccat | gttggtcagg | ctggtctcga | actcccgacc | tcaggtgatc | tgcccacctt |
| 99721 | ggcctcccaa | agtgctgaga | ttacaggcgt | gagccgccac | gcccagccag | cccccattta |
| 99781 | atattaatac | tatgtggttt | cctattgctc | ccatctctcc | agcctccagt | ctaaccatac |
| 99841 | atattcatcc | ttctctcccc | ttcagttata | taacctttaa | ggtcttcaaa | atttccaagt |
| 99901 | acccttccac | catagaacct | ttgcatatag | cagtcacatc | tgcctggaat | gctcattcca |
| 99961 | caccaccccc | taccccataa | gttaatttgt | acttatcctt | tagatttctc | tcagtcactt |
| 100021 | cttcaggaat | gtcttcctgt | agactgttca | gaccaggtca | gatccctcaa | ttacagcaac |
| 100081 | ctcatggccc | tctcctttgt | agtRttattt | agttgcaatt | Wttaatgtgt | ttgttaagca |
| 100141 | cctactactt | gccggcacta | tgagatacaa | ctgtaagaaa | aaatatggtt | tctgccctgc |
| 100201 | tggtgtttat | ggacatacag | atagtaagca | gataattaYa | gtgttacgag | tgctaccatg |
| 100261 | gcaatcatag | cactacaatt | acagatttga | ggataaaggt | agacttctca | gaaaagttga |
| 100321 | aacctgatct | gagccctgaa | ataagaatta | gcaaagcaaa | aggaggagag | aaaaactata |
| 100381 | ttccaagcag | acagagctgg | aaggagacac | tgttccactt | agaggcccag | tggcaggtgc |
| 100441 | agggaactta | tggtgagtgg | ttgcatttgg | ctagactgca | gaattggagt | tgaggatgag |
| 100501 | atggtagtag | aKgggggtgg | acaggagcca | ggttgaatct | tggtcctcct | tttggcacct |
| 100561 | gggaatataa | cctcccagaa | tatattagat | tatgtggcag | atttttcttc | tttttctttt |
| 100621 | gacagggtct | cgctctgttg | cccagactgg | agtgcagtgg | cacagtcata | gctcactgca |
| 100681 | gcctcgaact | cctgggcttg | agccatactc | ctacctcagc | ttcccaagta | gctgggacta |
| 100741 | taggcgtgag | ctgccatgcc | tggctaaata | tgtggcagat | ttttcatagc | agcctttgat |
| 100801 | tttttttcca | ccatcagtcc | atcatcagaa | actctcgggc | caggctgttg | aatctcctat |
| 100861 | cagatttatg | tgattattcc | tcaaagcttc | ctgtgttatc | atgttgcaac | ttgcctgaga |
| 100921 | gagggcagga | ataggctagc | aacaaatcaa | attccaaatg | ttagtaattt | cccaaaactg |
| 100981 | aaaacagttt | tctgtcaact | tgggattggt | taaataaatt | aagtgaataa | cattaaagta |
| 101041 | cgataYatag | tataaaatac | tttgcaacta | ttaaaaaggg | taatagtcta | caacaatttg |
| 101101 | aaaattaaaa | aataggttta | caaaggaata | ttgtttattt | aaaaatatac | ataatctagg |
| 101161 | ctgggcacag | tggcttacac | ctgtaatccc | agcactttgg | gaggccaagg | tgagtgaata |
| 101221 | gcttgagccc | aggagtttga | gaccagccta | agcaacatgg | caaaacYgtg | tctctacaaa |
| 101281 | aaatacaaaa | attagcaggg | tgtggtgacg | tgtgcctgta | gtcccagcta | ctcaggaagc |
| 101341 | taaggtggtg | ggattgcctc | agcccaggag | gcagaggttg | cagtgagctg | aggtagcacc |
| 101401 | attgcactcc | agcctgcaca | acagagcgag | accttgtctc | aaaaaaaaaa | aaaaaaaaga |
| 101461 | aaaccgtgtg | tgtgtgtgtg | tgtgtgtgtg | tgtgtgtgtg | tgtgtgtgta | aaaccttatt |
| 101521 | agctatacat | tctaggttat | attcccaaac | tgttaatgga | gattcaaact | ttgagtttct |
| 101581 | atttgatgta | cttcttgtca | tttcacttta | ttcatctatc | atattagctt | ttacagttaa |
| 101641 | aaaacaaaac | agttaaagat | actgtcaatt | tggaaatgag | aaattccagt | tccgaaacaa |
| 101701 | ggcaggtatg | cccctaaccc | tgtcattcat | caagttagtc | agtctggaca | gatgaaggtg |
| 101761 | ctggcatctg | attacctcct | ggtcataagc | cagaatagca | gatgggaaag | actgactcca |
| 101821 | aaaacacagc | cacaggagta | agcatggcag | catcaacact | ttgtcagttc | tccccagcag |
| 101881 | tcaagctctc | tatgtgacac | cttgaagact | ccattaattc | cttcatttct | tctttcattt |
| 101941 | ttccattgtc | catccatttt | catttgtcca | tcaaaccttt | agtgaatatg | gatttttttt |
| 102001 | ttttttttgg | ccaggctcaa | tgcagggtaa | tgatgagaag | ggagaaagaa | gtctgagtct |
| 102061 | tgtccctgtc | ctcaagctta | tagggagtaa | acaaagttgg | ttataatgaa | attaacagag |
| 102121 | aatacaactg | cttccattta | ttgagcacct | gatgccagat | gtacaatagt | tctcaaggta |
| 102181 | gggtttgtct | ccatttcaca | gatgagtaaa | caagctgtaa | taaaattttg | tttgaagtac |
| 102241 | agtgggggca | tgcagaagtt | agctattgcc | gtgtaataaa | ccatcccaaa | acacagtggc |
| 102301 | ttaagataat | aaacatttat | tattgcttct | aagtcttaga | gtcagctgga | gggttcttct |
| 102361 | gctttggctg | ggcttactca | tgtgtcggca | gtcatctgtg | ggttgggtga | ctctcctgat |
| 102421 | cttgactggg | ggtaggctga | ctgtgggcta | gtctaggatg | gcttcagctg | gtatctctgg |
| 102481 | ctctttYgca | tgtctctcac | ctacacatct | cataaccctc | cagctgatca | gccatgttct |
| 102541 | catggcactg | gcaaagagca | agagggcagg | cctcctttaa | agcttctgtt | tgcttcatgt |
| 102601 | ttatcgacat | ctcattggct | aaaacaagtc | acatgtctgg | tcccagcatc | agagtgagat |
| 102661 | gggactacaa | tgttataggc | aaaaagagat | ggatacaggg | gagaccatga | atagggatca |
| 102721 | tcaaaacaat | cagcctaaca | caggacacat | taaccaattt | tatctggaaa | agaaaggctt |
| 102781 | tatagaagag | gctacactag | aactgagtgt | tgaaacatga | gagagtattc | actaagtggg |
| 102841 | cagctgttac | ttggaactgg | atgcaggctg | gtttaccaca | atcaatagaa | actcagcagg |
| 102901 | tctttctgtg | ctcatgacag | ggttctatta | tttgtatctt | ggcttcattt | cttctggtca |
| 102961 | ggcacagagc | agcaagcacW | caacaaatgt | ttgctgaatt | gaattgaata | tcttactgtg |
| 103021 | aacaaggtgt | ggactgaaac | agctgaacct | gggaaccaat | tgttagaaag | aacagcttag |
| 103081 | catcaactct | tctgaaacag | aaatcctcag | aattggcagt | ttctcattca | ttcatcccac |
| 103141 | aaacattttg | agtgcctgtt | gtaaacctgg | ttctatgttg | gataatgaat | aagatgcgat |
| 103201 | actagctcac | agcctgggct | acagcttaaa | tgcagaaggc | taaaaattta | accagcttct |
| 103261 | tggggctcca | tttttaatac | taatYcattc | agaaaatgca | acaggagctg | gtgctacaca |
| 103321 | aaatcagaag | tctttaggaa | ctgcactggg | ttgctctgNc | aagaaaacta | acagtaaaaa |
| 103381 | tctgccctta | agtattttaa | gttaaaatcc | atgttcagtg | gtgcataact | ctggggtacc |
| 103441 | aacccagtat | ttactttgag | aaaagtatcc | aatcttgctc | aaaggtatca | aatctgYtgt |
| 103501 | aggtgctgaa | gtgggatgag | cttctRtcta | agctaggttc | ctctagttct | gtagtagaca |
| 103561 | gccaggttcc | tctattttta | caaaagaata | atgtgttctt | tgttgtctgc | ctgtagattt |
| 103621 | aatatctaaa | agattcaagt | ctccctaatt | gacaatccat | gcccatggga | ccagttcata |
| 103681 | acagaattaa | gctgtgaagt | gactcaatct | gtcacctccc | caaagctcag | ctggtactgc |
| 103741 | tattttttca | gaacaagaca | ttcattttcc | tctaaaccta | ctaaacttga | tccatgtata |
| 103801 | tgttaaattg | ccaaaaaagg | aatttacatg | aactgtatta | ggcttaaact | gaattataag |
| 103861 | atatcaggtc | cttggttttt | aacagaaatt | cttttttttt | tttttttttt | tttttttttc |
| 103921 | ctgagacagg | gtctacaggg | tcttgctctg | tcgcccaggc | tggagtgcag | tggcacaatt |
| 103981 | atagctcact | gcaacctcca | acttctaggc | tcaagcaatc | caactgcctc | agcctcccga |
| 104041 | gtaataaatt | ccattttaaa | gttgtttgcc | aatttcattg | tctctgcaaa | ctaatttatc |
| 104101 | ctttgaatcc | aatgatgaga | actgcaatcc | caaggtttct | ctttttgctt | tggctgccag |
| 104161 | gaatttcaga | gctaaatgta | ggcttagatt | cttaaagtgc | ctggcacatc | tctctcttcc |
| 104221 | tgtaatctag | tttctgatct | ttctcttcca | tttttaactt | tctaatctgc | actgtccagt |
| 104281 | atggtagcca | ctagtcacgt | acatttgaca | ggtaggctag | tccaaattgg | gatgtgctgt |
| 104341 | aagtgtaaaa | tatctcagta | agttttaata | ttgattacat | attgaatgat | tttttgatat |
| 104401 | attgggtaaa | attaagttat | taaaattaat | ttcaccactt | cattttactt | attttggcta |
| 104461 | ctagaaaatt | ttaaattata | tatatggctt | gcatttgtga | cattatattt | ctagtggatg |
| 104521 | gcactattct | gcaaatcatc | tgttttatga | ctgtgttatt | attgtaaacc | tgaaatcctt |
| 104581 | ttggaaagca | ggtgaagtaa | tacaaataat | aatacaaagg | tggcagcagt | ggatggaatg |
| 104641 | agaaagggga | ggtcgactgg | gRcaagttct | tgtccttatc | cttgtcaatt | tgtcttttgc |
| 104701 | ttgtgtgatt | cacatacaaa | ccccttggta | aagtgtgttg | tcagctctct | tcatcccagg |
| 104761 | tgagtagtat | tctcatggct | ctcccttgtc | tccagaaaaa | cctcagcttt | actttagcta |
| 104821 | acaaattgga | aacgatctga | taagacaatt | cacaccacat | tgcaagtgac | tgataacaac |
| 104881 | attgtgttca | tccctgtcag | ggagtatttc | cattttaacc | ggaaacaatc | cctgaaccca |
| 104941 | caggaatgaa | tgcctaatgg | tggagtttca | gccatcagtg | acaggtgagt | gagaggtaga |
| 105001 | ctctggtttt | gtgtgtgtgt | atgtttatat | gtgtatggct | acattcagga | tagggctgaa |
| 105061 | agtagggtat | ttggatggaa | aggtaatggg | gctggcagag | aagccaagcg | gagaaggtgg |
| 105121 | caaatcccca | gctgggccag | actgagaggg | gtggtgagac | accaaccaga | tgcggtgcag |
| 105181 | gccctcaagg | atttgttaag | caatagaata | gcccagttga | tgtcaMcaga | gggtgggtat |
| 105241 | caagacagtc | tccacagtaa | ctactgtaga | gtaacagaaa | aggtctcaga | gtaggattca |
| 105301 | ggagattatg | actgcagtct | acaactgact | cactggctta | actctgggca | agtcctttta |
| 105361 | ccccttgggt | ttcagtttct | tcatctggca | ttttccagac | aaagaaatgg | gtgttcgatt |
| 105421 | ctcaaatgag | ttctaagaga | tgtgaaggtg | ctctgagaag | tagaaagtgc | tctatacatg |
| 105481 | caaggatgca | aggaagagtg | atttcatatc | ttaaaatgga | aatacagcca | ggcaggccta |
| 105541 | gagtagtaga | ggacagaaag | cagggatgga | ggactatggg | gaaacctgaa | agccggtgta |
| 105601 | cttgaaacac | tggtctttct | ctgtcctccc | aggctgaacc | cagactccca | gggcacctgc |
| 105661 | ttgcaccttt | gaatgatggc | ctgaactatg | aacaaacggg | actatatgaa | cacttcggta |
| 105721 | caggagcccc | ctcttgacta | ctccttcaga | agcatccacg | tcattcaagg | tcagccccca |
| 105781 | gagcacagta | ctccactcac | taaggcagca | ggcccagtgt | ggtccctagg | aagaaaccat |
| 105841 | aatctactta | aaagcctaaa | gagattcttc | ccatatgctt | gcagatgtgt | tgttactgtc |
| 105901 | ttttggaggg | taggggagag | tgagaggttt | ttttctgtct | ttttgtttgW | tttgattttg |
| 105961 | ccccgataca | gccccaggag | atcctaagaa | catgtgcccc | tgtttgtttt | ttttaagcag |
| 106021 | caaatctgaa | aggaaacagg | gggctatcac | agtagttgat | catctttaaa | agaagccagg |
| 106081 | ctacagcagg | aaagtcaagt | ggaagaaaac | tgggaagcca | gtctatcagc | caatagtttt |
| 106141 | attctcctgt | ttttacctga | agagaggagg | aaaacacagg | ctcctgtgga | gtcccagcaa |
| 106201 | gtaggcaaaa | cctttctcct | ctgtctgcag | acacaagcct | aatctgactg | gccaaacatg |
| 106261 | aggggtctta | tctacaaact | ggcatatttc | cagtttaaat | acttactgac | aaatttctta |
| 106321 | cactcattcc | agccaaatcc | aagtttattc | catcatcacc | tacacttatt | gcaggttcca |
| 106381 | acactgtcca | cactcgctcc | cattttgcca | ttcaatgtct | ttgtaaatgg | gtagctagtc |
| 106441 | ccttcaggag | ggaacatagg | gaggctgtca | gccatgtcat | attcccaatg | agtcatccgt |
| 106501 | tcttcctagg | gaagttctgc | catccctggc | ttttgttatc | tggtctttca | ttaaagcatc |
| 106561 | agtccatctg | tcctcacaga | atacacgtta | acatccacta | tctcagaact | attatttggc |
| 106621 | tttagtcttc | tctcaggcaa | ctggtagcca | ctgcctttaa | gctcgggaag | ctggcaaata |
| 106681 | gcaccagtct | tagattgggt | ttagggtcta | cttgggttat | catcagccac | agtggtaact |
| 106741 | cacgtttgtt | ctctcacgag | cacacagcca | cctgctgtga | tctttattgt | gcactgcatc |
| 106801 | acttctgatg | taatccatgt | ttcacaaggg | gttttagctg | caatagtaac | tatctctaag |
| 106861 | acaggtgcaa | tgacagaggt | gggaaggaag | tatacctcct | acctatcatg | ggaatttcta |
| 106921 | actctgatgg | aggaggtgta | gctctgccct | ctatggagtc | ctcagaattg | ggagagagac |
| 106981 | aagcagtacc | aagggtaact | ctacatcaca | aaacgtaaat | ggtacagatg | gcccatcctt |
| 107041 | cattcaaccg | ttcaatattt | actgagcact | tactaaaagc | atttatatat | gtgtgtgtgt |
| 107101 | gtgtgcgtca | tatgtatatg | ccaggtattg | tgctccttgc | taggtatgtg | aggcacatca |
| 107161 | aaggcccaaa | aggtcagagt | cccttcagat | tccccagagc | ttctgaaaca | cttatttaca |
| 107221 | gctggggtta | agggatacaa | tagagtttgg | gggtacctgg | cacactattt | ggtgaatgaa |
| 107281 | taaatattac | agaatctgaa | acggcagtgc | ctttggaagg | catctaatct | gtgctaccat |
| 107341 | caacccagtt | cctctaactt | ttcacaaacc | tagagtgtta | aggaagtccc | ccaccatata |
| 107401 | cacctaccaa | caccttccag | ttggtggttg | agggatgaca | cagggaagtt | caatcaaact |
| 107461 | aacttgtatt | ctgacacatg | gcaagagcta | catggcagcc | tttcagagag | aggaaaacag |
| 107521 | gaacatagtt | tcccagatct | tcctggagct | aaatgctccc | cagttcccaa | agcattgata |
| 107581 | tttgtggtcc | agcttccaga | cctgctttgg | cctactctga | acaaggaact | ttacagattc |
| 107641 | ttaggcagtg | tagtgcattg | gtggaatctg | agaggagcag | caacctgtgg | cagcctggat |
| 107701 | ataccactcc | atccttgRta | agagcagctc | cagccagcat | caagttttag | gcaactctgt |
| 107761 | cccaccagtg | attccctctg | agcttggcct | ccaccccatg | cttggtggca | ttccccaagc |
| 107821 | tgctacctta | tcacatgggg | cactagttca | tgtggggtta | ttttgacctt | aattttgatt |
| 107881 | catctgtgtc | attctgtttc | agggttctMa | ggaggtRtgg | ggagggaagc | aggattagga |
| 107941 | attcatgagc | tggggtacgc | cgttccagta | ccctcctgca | accccaggcc | ccaattgtgg |
| 108001 | gtcctgctca | ctctaggatt | aaggcagaga | gccatctggt | ggatgttgcc | tgacctgcat |
| 108061 | ctgaggagga | ggagaggtgg | gggtggaagg | gcaaagggtg | tccttccagt | agagagcaga |
| 108121 | agagagtgaa | gaaagctggc | tagcttccgc | aaatactaaa | tacttccttc | cccaggggtg |
| 108181 | aactagggaa | ccaaaggctt | agcagcaatg | ggaactggac | ctcattttga | aaaagtggga |
| 108241 | gtgaggcttt | ggggtgttcc | atacaccggg | gttctaacat | aatcctattc | cctattctct |
| 108301 | ctcctcctca | gccaaacttt | ctgaggatgt | tgtttatgct | aactgcttat | atccattcac |
| 108361 | tctttttttg | gtagagacgg | ggtttcatga | tgttgcccag | gctggtctca | aacgcctagg |
| 108421 | ctcaagcaat | cctcctgtct | tggcctccca | aagtgctggg | attacaggca | tgaaaccagc |
| 108481 | ctccattcac | tcttgaactc | actcacttcM | atctggcttc | tgcctccagg | cccttgccat |
| 108541 | tccactgaag | cagcccttac | caaggttacc | agggacttct | aagttgccaa | aattactttt |
| 108601 | cagtccttac | ctccctggaa | cttactacta | taaactattt | actccctgaa | catctttaaa |
| 108661 | ctgtcctctc | ctgattttcc | ctgatcattt | aacttctcta | atggattctt | cttcctccct |
| 108721 | gaccttcctc | cctaccctca | ctctccctga | ggaatctcat | ctctttccct | aacttgtatg |
| 108781 | ccttctatgc | taatgattct | caagtctgtg | tctcctgagc | ttccgacctt | catctccaac |
| 108841 | tgcctacttg | acttctccac | ctttttgtac | aggaacctca | aatacaccaa | agctaagcct |
| 108901 | gaactcatca | cattcccaat | gctatttctt | cttctgtaat | tccttaccag | ttaatacaac |
| 108961 | tggcaaccac | cctttaatat | tcttctacct | ttacatccag | tcaaccaaat | tatgttgatt |
| 109021 | gtagggccct | ctcatgtctt | gcttggatga | ctcaaacagc | caaattggtc | atttggtcca |
| 109081 | actcactccc | taaaatccat | attccacact | gacacttaag | agtgatcttt | ctgaaataaa |
| 109141 | agatttgaat | catttgcttt | aaacactcca | gtgccttccc | attacacaca | gggtaaagcc |
| 109201 | caagatcctt | agcctgacat | ttgagacttt | tgactggatt | cctgcctcct | tttcctctct |
| 109261 | gtcccccttg | tgcagtgcgt | gcaagcactt | gtgcaggcac | acaaacccgc | cccagactcc |
| 109321 | ctggctgttc | tgtacctcta | tacctttctt | catgctgttc | cctgcctgtt | tacccttctt |
| 109381 | tgcctgataa | acatccccta | atccatggag | attcagctca | ggcttcacct | tccctgggaa |
| 109441 | acttccctga | gctcccatac | tgggtcaata | gcctctcttc | tgtgctgcta | caactattat |
| 109501 | atagcactta | tcacaccatR | ttgccagctt | gctcccatct | tgcccatata | agctcctcca |
| 109561 | aggcacaaat | gtctgctctc | tgccctatta | ttcatacaaa | gtctggaaca | gactgtctct |
| 109621 | cattttgttt | atcactgtat | atccagtacc | tggcatactg | taggtactca | acattMatgg |
| 109681 | aaagagagac | aggatatcaa | agtgtattcc | aYtgaagtga | attctatagg | ctttaccagt |
| 109741 | agttaattca | ggattttgtg | ctatcatcta | ctcagctcaa | gcccaacaat | tctggttctt |
| 109801 | agttttcctc | aaccccacac | tggtttggta | taaaaaagac | ccagtggtac | agtggacatg |
| 109861 | agaagtccat | gtgacctgga | aagccaagag | cttgagatag | aagtctctgg | cccttagtct |
| 109921 | aaacttactg | attgctggaa | gctgtgggac | agggttgcac | tagactcagg | cacagggcta |
| 109981 | tggcccttcc | agaccctcca | gctacagcct | ggatggctaa | tctttccagc | tctgtccctt |
| 110041 | cccaccccct | aaagccaaaa | aagcaaagat | Ratacccaag | tctcactttg | tccccacaga |
| 110101 | tctggtaaat | gaggagccaa | ggacaggact | acgaccactg | aagcgttcaa | agtcggggaa |
| 110161 | atcactgacc | cagtccctgt | ggctgaataa | caatgttctc | aatgatctga | gagacttcaa |
| 110221 | ccaggtggct | tcacagctgt | tggagcaccc | agagaacctg | gcctggatcg | acctgtcctt |
| 110281 | taatgacctg | acttccattg | accctgtgag | ttcctaacag | taggaatcca | gtcaggggag |
| 110341 | cctgaagcca | ctttgttcag | cccccaacct | ctccactcct | acatgttatc | aaggaagtaa |
| 110401 | tgaggcagca | tggtacagtc | caaagcacaa | ggctaggggg | ccagacagat | agatgtaggt |
| 110461 | tcaaatcctg | ggtttgcctc | ttactgactg | tgactttgag | caagctacct | aacctctcaa |
| 110521 | aactgcagcc | tccctgtcgg | aaaaatgggg | ataatatgcc | agtatcataa | aggttttgtg |
| 110581 | aggattgaat | gaaaatacat | gaaaaccacY | gggcacagcg | gctcacgcct | gtaatcccag |
| 110641 | cactttggga | ggccgaggtg | ggtggatcac | aaggtcaaga | gagatcaaga | ccatcctggc |
| 110701 | caacatggtg | aaaccccgcc | tctactaaaa | atacaaaaaa | ttagctgggc | gtggtgRYgg |
| 110761 | gcgcctgtag | tcccagctac | tcgggaggct | gaggcaggag | aatcacttga | acccaggagg |
| 110821 | cagaggttgc | agtgagccga | gattgcgcca | ctgtactcca | gcctggcaac | agagtgagac |
| 110881 | tccgtctcaa | aaaaaaaaaa | aaagaaaaga | aaatacatga | aaMccaacaa | acaactggta |
| 110941 | catcagaggc | tgaagtaaaa | ttStaactgt | cactgcgcac | ccactgtgac | ctgtgctggg |
| 111001 | ttctcctgtg | gaagaggtag | tcaataaagt | acagcactta | ctttctgtga | actcagattc |
| 111061 | aagttttaag | aaataaagtt | tggccttttc | tagtccaaga | tccctaagag | gggaaaggag |
| 111121 | ctggagcatg | acttggacac | tattcccctg | gtgtggtgat | ctcaatttaa | ccagtatttt |
| 111181 | aaaagcttct | tatgtgccta | gcatgatgct | ctgtcttcct | gttgcttgct | gtgatagaat |
| 111241 | cgtaKatcac | caaagctgga | aaggtcttca | gtgaaggggc | aactaaggct | gagagaggca |
| 111301 | agtcagtggc | agtgctggta | cccaggccca | cactcctgac | cctcagatca | cagctccttt |
| 111361 | tcagtgtgat | gccctgtatg | tcttaaaaca | taaataaaag | taggttacag | tcatacagta |
| 111421 | tggctgtgga | gggttgRagt | ggagggcagg | ttgttcccca | cattcttcct | tctctgccca |
| 111481 | cgagtcagcc | ctgagcagag | attcagggtc | ctgtcctgtc | tagcctggct | tttggtttcc |
| 111541 | ctccccaaca | ggtcctaaca | actttcttca | acctgagtgt | cctctatctt | cacggcaaca |
| 111601 | gcatccagcg | cctgggggag | gtgaataagc | tggctgtcct | tcctcggctc | cgtagcctga |
| 111661 | cactccatgg | gaaccccatg | gaggaagaga | aagggtatag | gtaagtgccc | tgcccctgga |
| 111721 | ggtagcgtct | agctgggctc | ccctaaagga | aaggaggagg | agaaacaaga | aatctacgac |
| 111781 | cattcttctg | ccatgcttgg | acctgggaag | ggagtaacag | acctctaagc | attccttgct |
| 111841 | ctcagtcagg | ataaacctaa | tctttcccaa | actatgctca | agtccctcca | ttccttgcag |
| 111901 | tcagggaaga | caacagcaac | tagtggaggg | ggaaggggat | tctggtgggg | gtgctggccc |
| 111961 | ccagcctaag | tcttccccac | aggcaatatg | tgctgtgcac | cctgtcccgt | atcaccacgt |
| 112021 | tcgacttcag | tggggtcacc | aaagcagacc | gcaccacagc | tgaagtctgg | aaacgcatga |
| 112081 | acatcaagcc | caagaaggcc | tggaccaagc | agaatacact | ttgaggctcc | cacgacccta |
| 112141 | gtagtcctaa | aggcctaagc | atagacagca | tggKttgaca | ataaataatt | tgagctgttg |
| 112201 | agcagatgag | aagtcactta | caccttgtag | agatgttctc | taactcaggc | aactgcaagt |
| 112261 | agctctagcc | ttttcttttc | tttttttttt | ttttgagacg | gagtctcact | ctgtcacaca |
| 112321 | ggctggagtg | cagtggcacg | atcttggctc | actgcaacct | cagcctccca | ggttcaagag |
| 112381 | attctcctgc | ctcagcctcc | ccagtagctg | tgattaaagg | cgcctgccac | catgactggc |
| 112441 | taattttgtt | gttgttgttg | ttgttttgag | acggtttcac | tcgtcacccc | agctggagtg |
| 112501 | cagtggtgcg | atctcagctc | actgcaacct | ccgcctgctg | ggttcaagcg | attctcctgc |
| 112561 | ctcagcctcc | tgagtagctg | ggattacagg | cgcctgctac | cacatccagc | taattttttt |
| 112621 | ttttgagacg | gagtctcgct | ctgtcRccca | ggctggagtg | cagtggcacg | atctcggctc |
| 112681 | actgcaaact | ccgccttcca | ggttcacgcc | attctcctgc | ctcagcctcc | caagtagctg |
| 112741 | ggactatagg | cacctactac | cacgcctggc | taattttttg | tatKtttagt | agagacgggg |
| 112801 | tttcaccatg | ttagccagga | tggtctccat | ctcctgacct | tgtgatccac | ccacctcggc |
| 112861 | ttcccccagc | taatttttta | tattttagta | gagacaaggt | ttcgccatgt | tggccaggct |
| 112921 | ggtcttgaac | tcctgacctc | aggtgatccg | tctgctttgg | cctcccaaag | tgctgggatt |
| 112981 | agaagcgtga | gccaccacgc | ccagcctttt | tttgtatttt | tagtagagat | ggggtttcgc |
| 113041 | catgttggcc | aggctggtct | caaactcctg | acctcaggtg | atctgcccac | ctcagcctcc |
| 113101 | caaagtgcta | ggattacagg | ataagccact | gcacctggcc | agctctagtc | ttattttgct |
| 113161 | gaaaaaggga | ggcaattgag | ggaaaggcct | gctggcctgg | gacactggag | acgtgggttt |
| 113221 | accacacagc | cttgggaaat | ttatctaact | ctctgggccc | ctttgtactt | ttcaRcttag |
| 113281 | agatttgggg | gttaaagtag | atcagtaatt | tccaaactct | tcacagagta | ccagggtctg |
| 113341 | tagagatgcc | tcacaggcct | ccatgacagg | ccaagaagat | ggcctatgat | ctctgaaacc |
| 113401 | agcccccact | tcaatcagat | caaagtaatt | ccattctgtt | ttatatgctg | ggattctgct |
| 113461 | taagatttca | tttgataaaa | agaatcttct | gcttaaaaac | atttgcttgc | tgactccata |
| 113521 | ttaggtattc | ccagaagagc | ctggtctgct | ttctctctcc | accccccaac | ccgccatgtc |
| 113581 | tcccttcacc | cccaggggct | gttggtaatt | ccaYtgagtc | tgaggcaggg | cccccaagaa |
| 113641 | tcaaagctgc | ctcagattca | ggtctgttca | gctttgacag | tgttcccatc | atcactggac |
| 113701 | aagggacaag | aacagtctca | tccagtctga | ggttagccca | agccaggtct | cagctaagag |
| 113761 | ctgacaccct | aaacccttgt | ctcttgggtt | catcttcaat | atccctggaa | gatgtcccct |
| 113821 | tccccccatc | ttactctcat | agacctaagt | aatcaaaagt | agaatgggta | gaacagaggg |
| 113881 | gccagaacca | gcacatggat | gaatatactt | cctttatcga | gggtgacaaa | ccaaaacaaa |
| 113941 | aaaagaccaa | acatgtaaaa | acccMgggtt | ctagaaatac | aaactcaatt | cattcaaatt |
| 114001 | caagctcatc | cagaccctgg | tcacaaaccc | tagtgaggtg | catgtgagca | ccaagtcagg |
| 114061 | gagagggggc | aggagtgact | ctgaggccaa | cagaRagggt | gggaagggga | tctccctagg |
| 114121 | tcccYtggtg | atcacccccc | acccaaactg | gtatctccac | attctcaatg | actatgaaga |
| 114181 | cataccaggc | tctgtccttt | tggcccccac | ccYatccctg | gccagagctt | caaaggccag |
| 114241 | tcccaaaagg | ttctaccctc | acttgctcag | gcttctaRcc | ttcctcttct | cctccttctt |
| 114301 | cacatttttc | tctgtgatta | Stagcaggtt | agggtactgt | ataagccgca | gtgaggctgg |
| 114361 | gggccaaggg | ggtggggtag | agatgggatg | aagagaggag | aagagctgtc | caaggacccc |
| 114421 | tctcttcatg | ggatcccaaa | ctgtacaacc | agctcctctt | ttgcRtccac | acggatctga |
| 114481 | gaaagtgcac | tgtaggcata | agcagctatc | ctggagacct | gagacagaga | ggggccgggg |
| 114541 | aggagaggaa | cagagacagg | tgaggagggc | aatcaggaaa | aatggggagg | ggagattaga |
| 114601 | tggtgatgga | gaaggaggga | atgaagggga | acaggaaggc | aaagagaaag | acagggatgg |
| 114661 | gagagacaga | aggaaaagaa | caaaggggag | tgaaacaata | aaggttgcag | gaaggagata |
| 114721 | ggaaagacat | aaaaagttaa | gagaacgagg | tgggagggag | ctggggccta | caaggctacc |
| 114781 | aggctcccta | actccacctt | ccctacctcc | tctgaggcag | agtgggtgaa | ccctctgcca |
| 114841 | taccctgggc | agtgtgagaa | gggtgggcag | gggcaggtga | ggggtgtctc | acctgctgca |
| 114901 | aatcagagaa | cgggatgggc | tcactggcca | gcacttggtg | gggctggctg | gtaagagacg |
| 114961 | gcagcggtgg | cagcttcttc | caatgggtca | ggctgctgct | cagcacagcc | aagcgggtgc |
| 115021 | tgaccaagag | agagggggtg | ggggtaggca | gttaagcYac | agtctgccct | gcccagccca |
| 115081 | ggtaagcctc | atcccctcag | gccagagaag | cagggtgtcg | aggaggggta | tctgggaggg |
| 115141 | aaggtctcag | ctcatcacag | actcaatcta | ggcccatctc | ccttggcctc | agYgccctca |
| 115201 | agagtgtcac | agggtaaaca | gggctgacat | gaataactac | tgaagcaccc | aagtgatctg |
| 115261 | tggtcagtct | ccagggctgc | accaaatgag | aagcttggac | taggggccag | gctccaaagc |
| 115321 | tggaacagtg | atggagggtg | ggagcccaag | tagcctgagg | gacccacgct | ggccaggtgc |
| 115381 | tcacctgtac | tgcctggcac | ggtccatgta | ctcatgctgc | tccatgccct | gtRagtctgc |
| 115441 | agcagacaca | tcaatgatgt | tgctatgggg | agaggagaca | gagatgacat | gacaggtgct |
| 115501 | tccgagaagg | acaaacagga | ctcagtgcca | ggtaccaact | ccagggctat | ctgacaccag |
| 115561 | tttccctcct | gcctactgga | gcagggctgg | acatggaggc | acctctcccc | agtgaccttg |
| 115621 | tcccatcccc | catgtcctga | gcctggctcc | ttctatccta | gcctttaata | tggatagagg |
| 115681 | agctctgacc | caggcctggt | cctctgacac | ttacctggct | gtcttggcaa | ggatggaaga |
| 115741 | gagcagggcc | tgctcatcag | tgcgagcgga | aggcaggctg | tggtagttgg | gctcggctcc |
| 115801 | attgagagct | ttggtagggg | ggctgctagg | gtccagcagc | agcttccgct | cctctcggtc |
| 115861 | ctagaagtgg | tcatgggaga | gaagtcagcc | ccaggacccg | tagatcctgc | ctttcacggg |
| 115921 | tgctaccctt | agcccagctc | tgaccttaaa | caccaaaaat | gtttctataa | ggaatatcta |
| 115981 | aagtgcccag | ctttatggaa | tgccagataa | gactcagttc | ctgcctatcc | ttgggagctc |
| 116041 | aactgagttg | gtgttctagg | ataaatgaga | gtggaaccag | gcagtcctag | aggccctgaa |
| 116101 | aaaatggaca | gaggcacaaa | gcaggtagtc | agcaacagcc | ctggagcttg | aaaaacattc |
| 116161 | taggacctgg | caaagaaagg | atactagagg | ctggaagaca | gWggagctga | gacatagcaa |
| 116221 | gcactgggat | ctaaagggga | aatcagtgca | agtcaagagc | ccaagaacag | ccttcctcat |
| 116281 | cccctaggac | caggccttcc | ccagcaaagc | tgttcgcttc | caagatgRaa | gccctggcga |
| 116341 | gtccagacaa | agccctaggc | cccaagagaa | agcaagccca | acctctccat | ggccatttct |
| 116401 | caaattatgt | cagggcagga | atcccagccc | agctctgggt | cacacagtac | aagtgtgttc |
| 116461 | ccttcttgaa | ggcaggtccc | ttcgaaggtg | ttcaccctcc | tgtgctctgg | tgctcttttt |
| 116521 | gtacgtgact | cccagaacca | aactgagtgt | acatggtgta | tcctgatctg | agcagtacag |
| 116581 | ctgtagccat | gtatggtgat | tcacaccagt | aatcccaaca | ctttgggagc | ccaaggcaga |
| 116641 | aggattgctt | gagtccagga | gtttgagacc | agcctgggca | acaaagcaag | acctcgtctt |
| 116701 | tgcaaaaaaa | aaaaattagc | tggacttggt | agtgtgagcc | ctgcagtccc | acctacttgg |
| 116761 | gaggctgaag | tgcaacgact | gtatgaaccc | agggtttgag | gctgcagtga | gYtaggactg |
| 116821 | tgccactgta | ctccagtctg | ggcaagagag | caagacccca | tctcaaaaca | aacaacaatg |
| 116881 | gcgctgttcc | ctcccttgct | aaaccacctg | agtagcccat | gtaaattttc | agcagccctg |
| 116941 | ttcctgctgg | cctgtgctga | taatcacaac | ccctgaacta | atgtaagacc | aaaccaagct |
| 117001 | tcctcattgg | tttggtcttc | ctccttgtcc | tctttcagtc | ccctgttcta | tctactgtaa |
| 117061 | tatttctgga | tttgaccctg | ccttgagacc | atcagctgca | aatccttgct | tgctgtatca |
| 117121 | gcagtaaatg | agaaaaacag | acctgctggg | tatctatcca | acccataaag | agcaagagtg |
| 117181 | ccctgaacaa | agccaaggat | Rggcccaggg | ggacatcctg | gctaatgctg | actcaccaac |
| 117241 | cttcagtgcc | agactcctca | atgctcccct | ccaggcctat | ctcagttcct | cagtctttcc |
| 117301 | tgctgcaggc | cgcagctccc | ctgcccacaa | ctccacaact | ctccttgtag | agggctactt |
| 117361 | cctcctgccc | tgcttaggga | ggcccagcct | tttcacctta | ctcttctttc | tcaaggctag |
| 117421 | gttgcccaag | tgtcctcagg | caatttgatc | cagttcccaa | cagcaagaga | cagaagctgt |
| 117481 | gggctttgcc | ccatcacctc | tataaactcc | cagacaccct | tcctccctaa | atacataggc |
| 117541 | tcagtattaa | agagctaaaa | agacNaaatg | tttgccaaag | ataaaactat | gtatttctaa |
| 117601 | ggaaagctgg | ctccataatg | aggcccaagt | tagcttccta | tgtgtctgtc | ctcccagctc |
| 117661 | cacttcagac | agatcttcct | gcaggacagg | gtagtctctt | ccctatcagg | ggttcttcaa |
| 117721 | gaagaaggtt | ggctgatcac | ttctcagcct | tcagctaaga | tcaagtgaac | aacaaggtta |
| 117781 | ttttcttgaa | acccagactt | aaagaagagg | ccatgctacc | tacttcagag | cagacaaaca |
| 117841 | tcaccccact | cccaaagtgc | gagtggagca | tgggttaggt | ttgtcacatc | aaggtttgtc |
| 117901 | tctgcattag | tgtaacccaa | gaggcagggt | ttcactgtct | accttagcac | agacatagca |
| 117961 | gcctgcccRt | gactggccac | ctggtctagg | ggcatggctg | agacagcttg | gccccatgga |
| 118021 | taaagtacat | ggcctagcgt | cagaacacct | gggcactagc | acttctcagc | ttggccaaat |
| 118081 | cacttagctt | ctctgaactt | cttcctcacc | tttcaataga | cataacccac | actaatatga |
| 118141 | cggatgtctR | gcaagagtca | aattagataa | ctgtgaaggc | cctttgtaaa | ctgtaacgtg |
| 118201 | ttgtatattt | tttattatga | taaagagaca | gagatgagag | tcggagaggg | gcctgcccaa |
| 118261 | gaactcaaag | agggactgtg | ggatggtgga | tggttatggc | ccttgctaca | tgaggcctca |
| 118321 | aatcacccag | cagtgattaa | gcaccttctc | tgggtgttag | gaacagaaat | gagagccccc |
| 118381 | caaggagaag | gtagagattc | aggagagcag | caggcccagc | tctcccttcc | aagtagaagc |
| 118441 | ttgtatcctt | tctcatacgg | cattaatcct | tcttgactca | ttccctgcaa | gagtccatat |
| 118501 | tatgctttaa | gggacaattt | cccactaggc | tacagctctc | ccagtaggca | gggttattgt |
| 118561 | tgtctctttc | tcaaaaaggt | ggaagtgaag | tgagaggtat | taggcacaac | acatgcctaa |
| 118621 | cacagggcaa | aggaaatatg | tgttcattgg | gtgtatggag | aattgagaac | cagaagccac |
| 118681 | ccttgcttcc | catacaaacg | acattttcct | aggcttaagc | ccttaatcca | aaatacgttc |
| 118741 | actgaagaac | gaactacttc | ccaagtacca | gtgatataat | ctatttttgt | gaccatcttc |
| 118801 | cccattagac | cgtgagctac | ctgaaacctt | tctactctct | caggtctact | atatgttcaa |
| 118861 | atgtagaatc | cgggcttaga | gacgatcaaa | aaaggagagt | agacagcaac | ttgagacttc |
| 118921 | atccttgaat | gtcaggccag | gcagggcagg | gattagagtg | tggggagaag | tgagaatgca |
| 118981 | ctaagaggaa | gagggagaat | ttaaaactgt | acaggtctcc | ccagcctaac | cctttctcca |
| 119041 | aaggtatcag | atctacagcc | aaattctcag | aataggcatg | tctccagcta | aaggaaccct |
| 119101 | caggccccag | gcagactgca | ctgaggcaag | ccaaactcag | aaccaaatga | acttcccgct |
| 119161 | ccatttctct | tttcccacaa | tctagccaaa | gctaaatcct | ctttgttgct | tcccagacaa |
| 119221 | tttcccacat | gtcccgatgt | cctcactgta | tcgattaaat | ccttcattgg | ccaattcaaa |
| 119281 | ggccaccaac | ttccagagtc | gtcccctggc | cctagactag | cagcgacctt | ccttctgcaa |
| 119341 | ccccagggac | taagacgata | cacgaattcc | tgattcatct | caggacagac | taactcaggg |
| 119401 | cctcagctta | cccaccccta | aaatggattc | gcaaagccca | ctaatacaca | gaagacacag |
| 119461 | gaagctgggg | aagggagtgt | ttcccgggga | cctagactga | ggatccttga | atctgaaaag |
| 119521 | ttttgaaggt | aggagcaaac | ggaagtggtg | ggagcgagcc | ggacaggcgg | ctgcctgcac |
| 119581 | accccgaggc | ggggactgtg | tagaaatctg | gggctttaac | aggggtagga | gcccggcttg |
| 119641 | gcgtctcctc | tgtaatctgt | cccctccagg | cctccgtatt | cagtgagccc | tgcagtccgg |
| 119701 | ctgcccgtcc | tccgcaggtt | tctttctggg | ccccatgccc | cagtgtctta | gccctcattc |
| 119761 | ccgagccccg | cctgccgcgg | ccgcacctgg | tccgagtcct | cgttctcgct | gctgtagcag |
| 119821 | caccccatgg | ccggggtcgg | gccgggcgct | caggccgcgc | cgaggaggga | cggcgtccgt |
| 119881 | gaggagccct | tccggtcaca | tgacccgcgg | cggcctcccg | caggcaacca | cccgccccca |
| 119941 | ccccccgtac | cccctgtccc | ggagccgctt | ggccgcctca | gtcaataccc | cggcttccgg |
| 120001 | tcccgcccgc | tagcgcgtga | tcgttgtcaa | ccaatgggaa | ggcgtaaccg | tacacgcaag |
| 120061 | cacgtgatgc | ggggaaaggg | cggggcggat | cacatgactt | catctttcca | gtctctaaac |
| 120121 | tggcagtagt | ggccatcgtg | aattgtgtta | tgcgttctcg | tggccactag | gccacttttc |
| 120181 | tgggccattg | agcgaactcg | taccaaatgc | cctcgtatgc | ccttgtgata | tactcttcta |
| 120241 | aatgccatgc | gaggggcgac | tgggatccag | gcctgatgct | ccagatcgta | cggtctgggt |
| 120301 | gcacacacac | agatgatcca | gatgaccagt | acctagtcgg | ggaacacaga | gggtgtatcg |
| 120361 | cccagctggg | ctgggggtga | atacacagag | ggtgtattct | ccacctgggc | tggggatctg |
| 120421 | cgacttacag | gaagaaggga | ccttatacta | ccttcacatg | ctgacgcgca | gcggagataa |
| 120481 | atcctggtag | aggagataga | agccacctca | ctgacctctc | tgctttcagg | cttttatctt |
| 120541 | taattctgcc | ttttttaaca | gcacccattg | taatcgaacg | cacaaagctg | accatcagtt |
| 120601 | ctcttttcct | aacccccgct | ccatgtcttc | ccttgggccc | tgaacacagg | tccaagtccg |
| 120661 | tccaagattg | tatagtgatc | catttgttgt | tcatgagcgt | gtgattgggt | gttcaccagc |
| 120721 | atgtatcaaa | tgtgccaccc | tcaaatcttg | ttttggcaca | ttacccgtct | gacataacaa |
| 120781 | gagcctgaca | cctctcccac | tgcatgttct | ggggtgaggg | gtggaggggt | cagcaatgtg |
| 120841 | tttcactgga | catagagaaa | taatgtagtt | tcctgattga | tctactggac | tttgtacatg |
| 120901 | cagcctggtc | tgcctactgt | ctttactgtc | ttcgagactc | agtacaatgt | cctcctgatt |
| 120961 | accttctctg | actccattct | ctggacatgc | ccagctccct | atgcttaatc | ctcatccagt |
| 121021 | gttaattcat | gcatttattg | aatcaacaaa | tatttgctga | gcgtctacta | tgtgccacac |
| 121081 | attgttatat | ctggatatgc | agcagttcac | aaaacagcca | aagtccctgt | agtcatggaa |
| 121141 | catccaatag | tgatcacact | atattgtatt | ctctgttcct | gggtcagtct | cacctaccaa |
| 121201 | acttgggagt | tcctggagca | cagtgacagg | ttctgactct | tccctgtagc | ccaaggcatg |
| 121261 | gccttgctta | cagaaaactt | gcatatcaat | gagcatgtta | cagtcacccc | atcaccttgg |
| 121321 | ctcaccccat | gccccatctt | ctgatccaaa | gtattggaga | agtcaccaga | tctcatacct |
| 121381 | cttataaccc | ctcaaatcaa | gaccctgagg | ttctgtaaat | cttttgaggt | tcctgaaggg |
| 121441 | taggaggcag | ctcaagctcg | tccctggggc | tggtaacttg | aactgcaggt | ctcaggtgac |
| 121501 | agcagcagcc | tcagcatgaa | taattgaaag | ccattccagc | ctcctacctc | agggttatcc |
| 121561 | cccgcagcag | gccctggact | ccccgacctg | tcctgtgctc | tggtcctcca | gcccaggtaa |
| 121621 | gcagggccct | ggattgtggg | ttcccaagct | caccagttca | agcccaccgc | atcactcacc |
| 121681 | tattcacacc | catccataca | ctctttcatt | tttactcccc | gccatcacca | ggggccttgc |
| 121741 | aagaaggccg | gcaaggaggt | cagatctgga | tgaggaggag | aatggtccag | gacatgggag |
| 121801 | gagaggccca | ttccccatag | gtccctggag | agaagagctg | agtagaggga | aaatgtgtgc |
| 121861 | tgtgtgttat | gtgtatgtac | acatttgtga | agggaattct | gagacagcac | aggagaagag |
| 121921 | gggaatacag | cggagaggag | atggggctgg | agaattatta | aagaatcaaa | gactcctccc |
| 121981 | atcctcaggg | aagagcaggc | agagggagag | tcctggggtg | ggaaagagga | catctcactc |
| 122041 | taacacccta | tggggtattt | tgattgcatt | ttactgaggc | agggcacagt | gatagtgaag |
| 122101 | gtgtttttga | ctgcaaatct | atgctctttt | gctacacagc | agtggtcaga | ggagaccagg |
| 122161 | caggcagagg | gtaggggtgg | gggaagatat | cccagaggtg | aattagtgaa | aggggtcctg |
| 122221 | aagaaggggt | gacttcaagg | ataaagagaa | acaagtcagg | ggaacaatgt | gaagatggga |
| 122281 | ccaggggttg | ggaccgggaa | gaggtggttt | ggggctgggt | gctgaaagta | gacagtatag |
| 122341 | agtccttgaa | agtacacagg | cttggaatca | cactaacctg | gattcaaatc | ccagttctgc |
| 122401 | tctgtgactc | tggacaaaag | acttagcctt | tctgagccgt | ggtttgtgaa | atataaggat |
| 122461 | aataattgct | actggcaaaa | gctacacaaa | taggcaaatt | gtgggtatgg | gattccctcc |
| 122521 | ctacctccct | ccaccccagg | gcccaggtag | ggaccatgtc | ccctgccatt | gcattggcct |
| 122581 | tcctgccact | ggtggtaaca | ttgctggtgc | ggtaccggca | ctacttccga | ttgctggtgc |
| 122641 | gcacggtctt | gctgcgaagc | ctccgagact | gcctgtcagg | gctgcggatc | gaggagcggg |
| 122701 | ccttcagcta | cgtgctcacc | catgccctgc | ccggtgaccc | tggtcacatc | ctcaccaccc |
| 122761 | tggaccactg | gagcagccgc | tgcgagtact | tgagccacat | ggggcctgtc | aaaggtcagt |
| 122821 | gttccctagc | cttctgctcc | aagaagtacc | cccaagacag | tgaaggaata | tttgggatct |
| 122881 | gttgctgctt | aactggatga | attgggcagg | ttcttgatcc | tcttttaggg | cctctttttt |
| 122941 | ttctcatctg | gaaatgagga | gcttggacta | agtcatttat | tcagcaaaca | tttattgcca |
| 123001 | cctcttttgt | attaggaatg | tgctaggtgc | cagggagagg | ggtagaggcc | acagagatga |
| 123061 | atgagccaca | aatgctggcc | tcaaaggaac | cataatacac | agtggaataa | ccatctcagc |
| 123121 | agataaccca | tagctttgta | attatctgtc | tccacatctt | tcctctccac | catggaggct |
| 123181 | tccacatacc | atttagggta | gctgtctgcc | tggatttatc | tcaatcccag | cataagtgct |
| 123241 | tttagggtct | tatttaagaa | attcggctgt | gtggtggctg | gtgcctgtaa | tcccagcact |
| 123301 | ttgagaggcc | gaggtgggca | gattgcttga | gctcaggagt | ttgagaccgg | cttgggcaac |
| 123361 | atggcaaaaa | cccatctcta | caaaaaatac | aaaaattacc | caggcatggt | ggcacatgcc |
| 123421 | tgtggtccca | gctacttggg | aggctgaggt | gggaggattg | cttgagccca | ggaggctgag |
| 123481 | gctgcagtga | gctgtgattg | tgccactgca | ctccagcatg | ggtgacagag | caagaacctg |
| 123541 | tctcaaaaaa | aaaaaaaaaa | agaaaaagaa | aagaaaagaa | attcactggc | tgggcatggt |
| 123601 | ggctcatgcc | tgtaatccca | gcactttggg | aggccaaagc | aggaggatca | cttgagccca |
| 123661 | ggagttcgag | actagcctgg | gtaacaaagc | aagacccccg | tttctacaaa | aaatttaaaa |
| 123721 | attagccggg | tgtggtggtg | agtaactgtg | gttccagcta | ctggaaatgc | tgaggtggga |
| 123781 | ggattgcctg | agcctgggtg | gtcaaggctg | cagtgagccg | tgatcatgct | actgcactcc |
| 123841 | agcctgggca | acacagcaag | acttggtctc | aaaaataaat | aaataaaagt | tcatccaatt |
| 123901 | ccaagatcag | aaatacattt | gatgagcaat | aaaaggggaa | tgaaactaca | aattctaaca |
| 123961 | gagacctttc | ataaatctga | aagatagggt | ggttgtttct | gcctgggact | tcatggagaa |
| 124021 | agagcaacat | ttgaactgaa | tctggaagtt | ctgagttggc | caggcagatg | gcgatggggg |
| 124081 | tgggaagggc | aaagccagcc | acatatacac | atgtggcatg | aaggaatgag | acagcttgat |
| 124141 | ggattctggg | cacagttgtt | tgggatggct | gtgatacagg | ccacaggtgg | gaagtactga |
| 124201 | gagatgaacc | tggaaaggta | ggataggatc | aggtccaagg | tcctgaatgc | caggctgaga |
| 124261 | atcccaagtt | caatcccaaa | ggccttcagc | tcacaggagc | caaggagtaa | taaggtcaga |
| 124321 | tttgttggaa | agattccagg | gctggtgtga | agactacact | gtaggagacg | gggaccagga |
| 124381 | gggcagctgg | ggctatggta | caagagacag | atgagacccc | ggctggttgg | gagctgcagt |
| 124441 | gaggcaggta | ggcatttgag | atatctttta | tcaggggccc | tgcatccatc | tcccatgtct |
| 124501 | tctgcaacag | ccatctcccc | tcataggtca | gatcctgatg | cggctggtgg | aggagaaggc |
| 124561 | ccctgcttgt | gtgctggaat | tgggaaccta | ctgtggatac | tctaccctgc | ttattgcccg |
| 124621 | agccctgccc | cctgggggtc | gccttcttac | tgtggagcgg | gacccacgca | cggcagcagt |
| 124681 | ggctgaaaaa | ctcatccgcc | tggccggctt | tgatgagcac | atggtcagcc | tcccatctcc |
| 124741 | ccaacccaga | tttttgtcac | cccaggcctt | gcccccagac | atcccttgtg | aaggactccc |
| 124801 | atctaaggag | aaggaagcac | ctccactctg | gggactgtga | tgctggatgg | tgtgtgagct |
| 124861 | cctgccctcc | tgtcccaagt | catctgcaca | ttattttctg | ccggatgacg | aaagaaacag |
| 124921 | ctaagaggaa | ggtctctgga | acccagcaaa | tttgggtcca | gctcttactc | tgcctcttgt |
| 124981 | tagctacgtg | accttgagca | aagcatgcat | cctctgaacc | ttagcttctt | cagaatggaa |
| 125041 | atcacaatac | tgatcctgac | ttcttaggtt | ctgaggtcag | aggaaatgtg | agaacactca |
| 125101 | tgggaagcta | agccaggacc | tggcatgaag | taagccagat | cctggtgggg | tcttgactgg |
| 125161 | gagaacaatt | ccccccaccc | tcacctccag | ctccccctat | ccccacaggt | ggagctcatc |
| 125221 | gtgggcagct | cagaggacgt | gatcccgtgc | ctacgcaccc | agtatcagct | gagtcgggca |
| 125281 | gacctggtgc | tcctggcaca | ccggccacga | tgttacctga | gggacctgca | gctgctggag |
| 125341 | gcccatgccc | tactgccagc | aggtgccacc | gtgctggctg | accatgtgct | cttccctggt |
| 125401 | gcaccccgct | tcttgcagta | tgctaagagc | tgtggccgct | accgctgccg | cctccaccac |
| 125461 | actggccttc | cagacttccc | tgccatcaag | gatggaatag | ctcagctcac | ctatgctgga |
| 125521 | ccaggctgag | gtccaggccc | aggggtactt | actgatgccc | acccccaccc | ccacccaagc |
| 125581 | agggacctca | aaatcccctc | cctttcctgt | ttggggcctt | gacacacgct | gggctcaggg |
| 125641 | ctagggagtc | tctcttccca | cctctgacct | ctttcagcct | ctacactgac | ctcaagtgtc |
| 125701 | aagttctatc | aggctgcttg | gtctcactag | gccccctctt | tccagagaga | accatggact |
| 125761 | gacagcaaga | agcctgagct | cccgacccag | ctctgtcact | gatttgctga | gtgactccaa |
| 125821 | gggaatcccc | accttgctct | gagatttaat | cttctctctt | aacacgaagg | aagctggatg |
| 125881 | ggagagctcc | aggggcctcc | cagttctcgg | cctcagaaag | ccccccatcc | tcagcccatg |
| 125941 | ccattctggg | tgggatcaga | ggaagtggca | atgagttaga | cgccctgcag | gaatagctgg |
| 126001 | atgcaagctg | ggccagagaa | aatggcacag | aaccctggac | ccagggccag | ggatgccctg |
| 126061 | gccttcccta | actctggccc | acctagccaa | ttaggtgtgg | ctgatgtccc | ttgagtgccc |
| 126121 | tcttcctaaa | gcccaaaaga | agatgctgga | ctcctctggg | ccccaccaac | aaatagggaa |
| 126181 | tagacatggg | tggaaaatca | ctcctttgtc | tttattaaag | aaacttagac | cagacctggc |
| 126241 | aatcaagggg | tgaggtactg | gccaggaagg | tggagtaggt | ttcaggccct | ggggatttca |
| 126301 | agtgcagact | gatggcctgg | gaggggccaa | agagaccaga | tcctggcagc | agctgaggag |
| 126361 | gtgcccaagg | gcactttcag | gcactggggc | catcagctgg | ttctgtgggc | aggggttggg |
| 126421 | ggttgggatg | cagggtagtt | tgggctggcc | tggaatctcc | ctgaggccac | cctgccttgt |
| 126481 | ctacctagat | catccactgg | tcctgatcct | gttcgttgcc | ttccatgtcc | acctggagag |
| 126541 | gaggctgggt | gtgggtgggg | aggggcctca | gccagcctca | gccccagatc | ctgcccctgg |
| 126601 | ctggatccag | ggtttctgta | ccccttggcc | atcaactggg | tcaggagcaa | gggtccagga |
| 126661 | acagaggccc | tcccccatac | cccttgccta | cctcattgac | ctctccatca | tccggtgact |
| 126721 | cattgtagtc | attcatctcg | tccatgtcct | gcatatcctc | atcatcctct | gagtcctctt |
| 126781 | cactatcctc | atcatcttca | tcatcctctt | cttcctcgtc | atcatagtgc | tggtgggcag |
| 126841 | gacagagcct | gtaagcccta | caggcctgca | tggaccagtt | caagaactga | cccacttgag |
| 126901 | cctctctcta | gggccaatga | atgaccccct | accccgacac | tccctccttg | agtctagcag |
| 126961 | gctggtgcat | gttctgcagg | accttaatgc | taggcccaat | gcccacccct | tctatctccc |
| 127021 | cttttaggct | tttacccaga | tctgagaacc | acaactgctc | tgggtcagag | acaggacatt |
| 127081 | cagaattaga | gcagagcctc | ggtccactgc | ggcccccaca | caggccccac | ctgctagagc |
| 127141 | cactcacctc | tgaggctggc | ttgccaatag | gaaccaggtt | gttgtctttc | tccgcgatgc |
| 127201 | tttggagctg | tgggcaaagg | cacagaggaa | caaggccaga | gcccaagtag | ggcaggtcag |
| 127261 | gggcatggga | ctggcccatt | ctgcccagaa | gacaacccac | acgtgttggg | gagaagcttc |
| 127321 | ctcccagttc | tcagggagat | acaatccctt | tcttgtcatc | tgccatttat | gaacttgatc |
| 127381 | caaatactta | aactctctga | gccttctttt | ttttgtataa | ttatggtgag | gatgaagtga |
| 127441 | gagacttatc | agcctagaaa | gcatcatctg | ctagatcctc | aattaatagt | caaaattatt |
| 127501 | tcctgtgctt | tagggaaaag | agcttgggct | gagtgtcagc | agcctgggct | ctaatctggc |
| 127561 | ccagaagtca | catggtaccc | ctgtaaaata | gggtaccaca | agatgagaac | cttggctccc |
| 127621 | tggctcccag | cccgattatt | cccagctcag | ggcaaaaagc | tcttcctggg | tagatttctg |
| 127681 | gagtaaggct | gggtcatggc | ccactgaagg | aggtctctgt | ctgtgctgRg | gtctctgtgc |
| 127741 | tgtgctagct | gctcactcac | ccaggcctga | tgctgctgtt | cctgctgctg | cagctctgtc |
| 127801 | tcttccacac | agggtcgatc | cagattaaac | cacagagtct | cagtcacacg | agggaagagt |
| 127861 | gaggggaaca | aagtggacat | ggctcctaga | ctgagggaaa | gggtcaagtg | aatgtgtttt |
| 127921 | gctttgtttt | tgtttttaat | ttggttgtaa | tttgatttRg | ggatagggtg | gaagacagca |
| 127981 | ggaaagcagc | ccctccccct | aggaatcaga | cagacctggc | tttgagtcct | ggctccacca |
| 128041 | cttactagct | gtttgacctt | ggctgagtca | cttaacctct | ctgagcctca | gtgtcttcat |
| 128101 | ctgtaaaatg | gggataataa | caattatacc | actgtcaaag | ttattctgat | aattaagtaa |
| 128161 | ataatggatc | aacaaagctg | tttgcaggct | gttcaaggag | ggatgagaat | gggagtcaag |
| 128221 | tgtagggata | ggaatccaga | atgcagactg | gcattatgaa | attatacaaa | attagaggta |
| 128281 | gcagggttct | actgaaacta | tccctacctc | ctccacacac | taaaacctgc | tttttgaccc |
| 128341 | tttatgatgg | cccataccac | acccacccag | tgtcagaaat | ttaggacact | aacgacctct |
| 128401 | catgaatcac | agccaaatgt | cggggtggag | ggattgtagc | atatgcaagc | agggttcagt |
| 128461 | aagacattct | aggaggcatg | aataagtgga | taaataagta | gatggaagat | tgaatggatg |
| 128521 | aactaacatt | ataagggtac | aatcagcttt | gagcggctga | gggagccgac | caggagtgcc |
| 128581 | agataatctg | aattaaactt | aggacaggcg | aactgaggcc | cagcgacagg | cagagactgg |
| 128641 | ctttaggtca | tacagtgtgt | cggggcttag | aattcctccg | tgaaagggat | Ragcaggaga |
| 128701 | aaataatcga | tgcctggtcc | tgcttttgtc | ttaatttatc | tgaccgaccc | agggccagcc |
| 128761 | gctgcccttc | cctgtatctc | agattcccaa | cccgcgtaat | taggcacgac | ggtaaacacc |
| 128821 | ctcatgtcca | agaagtactg | acagaccagc | gatctcggct | ccgaaagccc | aacccaccgt |
| 128881 | cgcaaagcca | ccgccctttc | tttgctcatt | acgataatga | ccatgcagtt | gaccaacaga |
| 128941 | aagaaagcag | ggcgggtctc | agacagaaat | ttggccttat | agggttgcta | aacgcgaaaa |
| 129001 | aagcggggcc | tgggtaggac | caattaactg | aaagaaatgc | tgggtgacag | gaagtgacac |
| 129061 | caatgaatga | cggaccttgt | gtgacSgggt | ggggcttagt | ctcgaggaag | cggccaatga |
| 129121 | gctggagctc | tttaagggtt | aaggactctc | aatatggagc | tcctggggag | tcgggtcaaa |
| 129181 | ggaaatgggt | ttctctgggg | gaaaaaggaa | tgaaggggca | aggagacggt | tgcagccttg |
| 129241 | cgtctgtact | taccgcgccg | ggaggctgct | gccggcggcg | acccggaagc | gcttcaccca |
| 129301 | gcctgagcgg | aagaacccac | cagaatccgg | gactcaccaa | acgcatgcgt | ccttcgtctc |
| 129361 | cttttgtttt | ccccgctccc | gcccactaaa | ccggatgtga | cgttgaccta | ccttagtcac |
| 129421 | attgttaggg | aaggaagtgt | gccgcgccta | cctatctgcc | ccSccttgag | tctcagccag |
| 129481 | tcggcgtctc | catcctggcg | ccagcactac | ggtctcgttt | aaccactgcc | ccgtttaacc |
| 129541 | cctgcccttt | tgttgccagt | caccatttgc | ttgttaaccc | cttctgaaga | agagctgaca |
| 129601 | gcaacctttt | agtgcgaggg | ccattcgtcc | tgctgcatcc | cagaaaacta | atctgttact |
| 129661 | acttcagaat | tgctggttga | tgttaggccc | ctcctatctg | tgctctctca | gctacagttt |
| 129721 | cccgtttgag | catattcatt | cttttttatt | tttgctctga | acaaaaatat | tagagttaca |
| 129781 | atattactat | attccaggcc | ttgctagaaa | ctggggataa | atctaggaat | atggtcgctt |
| 129841 | ccctggaaga | cctcacagtc | cagggaagcc | aaaccctgca | gacatgcagt | agacttagtR |
| 129901 | gtctctctta | aggttgcttg | ttgagttttg | acattggaga | ttatgtacag | acttgaatga |
| 129961 | ctagttagcc | tcaggcacag | cattctgttg | ctgggggaat | cagctgccct | cctcaggcct |
| 130021 | gggccaagta | cacttagaga | tcgccctcgt | cacctctccc | atcctttgct | gatgcctctg |
| 130081 | ttctagtaac | ctctgactca | gcttcgcctt | tagagatact | catgctttct | ggcaacagag |
| 130141 | gtccttcaaa | cccaattcct | attaaactcc | atcacttacc | agcctctttc | agggacagca |
| 130201 | gttatccgca | tttccagtac | tgtcctggcc | agatgtgtga | gttttggcaa | ttccttttcc |
| 130261 | tctctctgga | ctcagcttct | ttgtcaacca | gcatcataat | ctctgcccag | ccttccttct |
| 130321 | atcctgggct | gatgtgaaga | ttggataaga | attgttcaag | aggtcgtgta | ctgtgcatat |
| 130381 | tgaatgtgat | tatattgcca | aatagcactg | tttgttatag | tttttcatta | aagagtaaac |
| 130441 | tttgcctctt | ggaaatgact | acctttttca | ttcattcaac | aaatacctac | tgagtgcctt |
| 130501 | agtatatgtc | catcactatt | cttagtagtg | ggtatacaat | agtaaacaaa | acagaccaaa |
| 130561 | aaagtccctc | ttttcatgca | gccttcattc | tgagagaggt | aaacaataaa | gaagatagat |
| 130621 | aaataaaata | tgtagttgta | agattgcagt | aaataagaga | aaaaataaat | ctgagaagtg |
| 130681 | ggaataaaat | atttgcaggg | gaggtgtttt | atttcagact | ggggggccaa | agtcactggg |
| 130741 | aaggtgactt | ttgagtaaag | gtctgaagga | gcagagagcc | ttctgatatt | tgtggaagag |
| 130801 | catttcagag | agagagaata | caagtgcaga | gggcctagaa | tggcttgggc | atagtgtcct |
| 130861 | ctagggagag | taataggtag | gagatgagga | gttggggagc | cagtggaggg | ttgtgagcac |
| 130921 | agggtccaca | caatctgatt | tacagtttaa | ctgagttact | ctggctgttc | tccaaataga |
| 130981 | ctggggtagg | ggagacaatg | gcagaagcag | ggagaccatt | tgggagccta | ttatgataat |
| 131041 | ctagaggtag | tggatgagaa | gtggttgaat | tctgaattta | tttagatggt | agagactaca |
| 131101 | aggtttgcta | acagatggac | aatgccagaa | taagaaagga | gccacgattt | ttgggctgaa |
| 131161 | cgactagaag | attggtgttg | ccactttttt | gagttgggaa | ggaatgggga | ggtgatgagg |
| 131221 | ggtttggttt | ttttttgaca | gggagcttag | gtttgagtgt | gttgagtctg | agatgcccat |
| 131281 | tagagtagag | atgttggggc | ggcaggaagg | catatgagtc | tgcaggtcag | ggcagagatc |
| 131341 | tgggctggat | agatcatttg | ggagtcattg | gcatgtagat | ggtgtttaaa | gtcatgagac |
| 131401 | tggatgagat | caccaaggga | gtgaatgtag | ttggaaaata | gtttcctcca | atattcagaa |
| 131461 | tttgaggaaa | ctaggaaaag | cagcaaacca | gatggagaag | gaaggccaaa | aagataagta |
| 131521 | gaaagctggg | tgagttgatg | gtatcttgga | agccatgtaa | agaaagggtg | gtaggagaaa |
| 131581 | atggtttact | gcagcctcat | tctgtacaaa | attgtgcttt | tgtttatttc | cccaacagac |
| 131641 | catgagctcc | ttgagggcag | ggactgaatg | gttactatgt | ccccagggcc | cagcatgacc |
| 131701 | ttctcctgga | ttcctcatct | tccttctgtg | acctgtgtct | ccatcagttt | ctcctccggc |
| 131761 | atctttttct | tacaggattc | ttacctcagg | taccatttgc | cccgtccttc | ctgataattc |
| 131821 | cgcctgctgg | aaattcccta | gtaacagagt | ttcttttcag | ggtcatcagc | caggctcagt |
| 131881 | aagtaatgat | gactggttag | ctggtgacat | ttattgagta | ccaactgagt | gccagacacc |
| 131941 | tttctaggcc | ctggggacag | aggggaagca | gaaataattc | ctgccctaga | gaaaaataga |
| 132001 | gtatagtgag | tactaagaca | attatagaca | attatagagg | agggtaataa | atgttaaaat |
| 132061 | caatgtatgt | agagaataca | tgagaacaca | gaggagggat | tgatgaatgg | gttctgaaca |
| 132121 | aactaagttt | agacttttgt | tccagaaaag | gaaacatttg | agtgggcctt | gagggatgag |
| 132181 | taggagttaa | gcccactggt | aaataagtag | gaaaagaggg | tgcacaaaga | ggcatatttc |
| 132241 | attcaagggc | atgtttggag | aacattgaga | atctgggcag | aactagatat | gtggagtgga |
| 132301 | gaaagatgag | aaagaatgat | aggggaccca | gatagggaag | gtctttggtg | gccctatatg |
| 132361 | gagtggatgg | gatgggatct | gggcatcttg | ggtctcacct | ttgtcttatt | gccgacttgc |
| 132421 | tggggacccc | aggtagatgt | ctccccattc | acaagcttcc | gtgttctcta | acataatatc |
| 132481 | taaccatgtc | gccagctctg | atgtgagtcc | ctggaaggga | ttcccctagc | ttgatccttt |
| 132541 | ccattcttag | atttttacat | ttgccttatt | tgtgatttat | acaaaccagg | gcctaggaat |
| 132601 | ggaaagcagg | gtcaggatgg | agatttctca | acagaaatca | ataaatccag | agcccagagg |
| 132661 | ctgaagatgg | aaaccatgat | tctatgcaga | gaattctcta | ggatccagga | agggccagag |
| 132721 | ttgagtggtg | tgaattcagt | gctagtgaaa | gctgcttact | cattccttcc | ataaaccttg |
| 132781 | aggagcatgg | ctgaccctgg | taggggacag | gggagaatgt | aacagtcaca | gtcactacct |
| 132841 | ttcatacata | tggagggata | gttggtctcc | agagagtttt | cccactcata | gtctccactt |
| 132901 | atccttagcc | cagccctggg | gattctgcct | tcatttagca | gatgaggaac | ctgaggctca |
| 132961 | ggaaagtaaa | gcggcttgtc | tgagttgaag | ctacaactca | agaatgtcaa | aatcttgcat |
| 133021 | tgttccacaa | atcttcctta | tgggctgata | tgtgcttgcc | gatggggact | cacagaggaa |
| 133081 | ttcgatttga | gtcctagtcc | tctgcaacta | cccagtatgg | tgtggatacc | agactaacgc |
| 133141 | aagtcattag | gcccttgagg | ccagatctct | gtgtgattca | tctgtatttc | cccggcacct |
| 133201 | tgcacagtgt | ctagcacaga | gtagccactc | aacaaatgtt | tatataagat | gggttttttt |
| 133261 | ccttgggtct | aatggaatta | tagttcacgt | gatgaatggt | ataacaggga | taggttctaa |
| 133321 | aaagagaaaa | gtgggaatgt | taaaaagtga | agagcagtgt | gggaggggag | gtggagaagg |
| 133381 | ctcctcagag | aagatgagac | cttgcaagag | gagttaggaa | agaatattct | agtcaagagc |
| 133441 | agacagcatg | tgcagaagtg | cagaggcctg | aaagggtgtg | gtgtgcccag | gacatggcat |
| 133501 | tgaccgaggg | cctgttgtgt | ggccatcgtg | gtgatgtgca | ctgtgaaaga | aacaggacca |
| 133561 | ggagacagta | ccctgtgctc | aaaggacaag | gcacagcctt | ggaggaggac | agggacatgc |
| 133621 | tgagaaaggc | ttccttgagc | aggggagact | tctgctgggt | catgaaggat | gcttcatagt |
| 133681 | tcgagtcaga | gaggaggaaa | gaggaaacct | cccaggtgtg | aggggcctcc | ttaggcaggg |
| 133741 | gctgtggttg | gaaggaataa | ggagaatgcc | caggcaggag | agcatggtgt | gtggagggca |
| 133801 | ggctggtcgg | gtgggagggg | ctgcagagct | ccactgggtg | ggctagctga | gggagtgcac |
| 133861 | cttagcgtgg | agtataaggc | ttgttctgcc | tcatggtcac | tcaacacctc | atttatttcc |
| 133921 | catcattgtg | gcctccctgg | acctgactct | gagtttggga | tggatagatg | cgttggaagg |
| 133981 | gatctctgtg | aattatcttc | cagttcccta | gaaagccagc | cccaggagag | gtgctccagc |
| 134041 | caggtcccta | tctgcatggt | ggttttgcgt | atgtttgctt | accacaaata | tatggtaagg |
| 134101 | tttcctcact | aaggtttaat | gggctaaggt | ttcctcactc | tgactacagc | aaaatagatg |
| 134161 | caaagtttga | agagaggccc | tctgcattgg | aggcaaaggc | tgaggagaca | cagacctaca |
| 134221 | cacacacaca | ccccccctca | ctttcatgca | gaggtggtag | gcagaatgaa | ggctccctgg |
| 134281 | agatacccat | gtcctaatcc | tatggtgtgt | atcctacctg | gcaaaaggga | ctttgcagat |
| 134341 | gtgattaagg | ttaaggactt | tcacatgggg | tgattatcca | ggtgggccca | atctatttac |
| 134401 | atgaatcctt | aaaatcagat | aaaactttcc | cagctgtggt | cagaaaacaa | gacgtgacaa |
| 134461 | ggaagaagca | tcagagagat | tctacattgc | tgactttgaa | gatggaggaa | agggccatga |
| 134521 | gccaaggaac | acaggtggcc | tctagaagct | ggaaaaggca | aggaaacgga | ttctccccta |
| 134581 | gggcctccag | aaagacctac | tgtcacccta | attttttttt | aattttttaa | tttttttgag |
| 134641 | acagtcttgc | tctgtccccc | aggctggagt | gcaatagtgg | gatctcggct | cactgcaacc |
| 134701 | tctgcctccc | aggttcaagc | gattctcctg | cctcagcctc | ccgagtagtt | gagattacag |
| 134761 | gcgcccacca | ccacacccgg | ctaatttttg | tatttttagt | agagacgggg | ttttgccatg |
| 134821 | ttggtcaggc | tggtctcgaa | cccctgacct | caggtgatcc | gcctgcctca | gcctcccaaa |
| 134881 | gtgctggtgt | gagccaccgc | acccggcccc | tgacacccta | aattgagacg | catgttacac |
| 134941 | ttgtaacctg | cagaactgta | agttaataag | cttgtgttgt | ttgctgggca | cagtggcaca |
| 135001 | ttcctgtagt | cccagctact | cgggaggctg | tgataggtgt | gttactggat | agtgctctgt |
| 135061 | aatttcaggc | tcttggtgtc | ctgaacaaag | aactggacca | gacacacaca | gatattaagc |
| 135121 | acagtattac | actcttagag | ggggagagtg | gactgacctc | tggcagatga | gatcaacatt |
| 135181 | agttttgtgt | actctgggtc | tttgtgtgtg | tgtgtgtgtg | tgtgtgtgtg | tgtgtgtgtg |
| 135241 | tgtgtgtgtg | tgtgttctct | tcccaaggct | gcctaatctc | tagccagtgt | ctgccttttt |
| 135301 | gattgataga | tgtgttgctt | agttactttg | gcccttgtgt | gtcacctcca | tcccataatt |
| 135361 | ttaagtacat | gagtgatttg | cagtccatat | gcatgagctt | caatgagcta | attaccaaac |
| 135421 | ggggtcattt | taaggatact | ttttctcttt | aatgtgcatg | cccatctctg | aggagctgcc |
| 135481 | cgcaacaggt | ttggtccgga | tttagcccag | atgggggctt | ctttttcact | tttgttttgg |
| 135541 | ctgttctggt | ttttatctcg | cttcttgctc | acctgcccct | tcacctggct | tctgctccct |
| 135601 | gcttttactc | attctgccct | tgatccaaat | tttaattccc | tttgctattc | tcctgctgta |
| 135661 | ttttccctct | tcccctgctt | caggaggatc | gcttgaaccc | tgaagtttgg | gaccagcctg |
| 135721 | ggcaacagag | cgagaccttg | tctcaaaaat | caattaatta | attaatttgt | gttgttttaa |
| 135781 | gccacttagc | ttgtggtagt | ttgttatggc | accaacagaa | aacaaatgca | caggtacaca |
| 135841 | cgtatatcct | cccaccctga | tagacaacca | cagtcataca | cgctcaggca | gatacaggca |
| 135901 | gggagaccca | ggaacatcag | ctggccctaa | gtgggggctg | gggagaaatg | aagcttcagg |
| 135961 | tgtgtgctgc | ggggtgggtg | gtaaggcctg | ctccttggct | ggtgtggaga | aactttgacc |
| 136021 | acatttctca | gtcttaactt | tgctctgctt | cctctcagtc | cttacgtcat | acttttagca |
| 136081 | acctttacaa | caacattttg | tcctaaaccc | tgttgcaaat | acatgtatga | acctcaaaga |
| 136141 | ctatatatta | aatgaaataa | gccagtcgcg | aaaggacaaa | tactgtagga | ttccactttt |
| 136201 | ctgaggttcc | tggagaagtc | aaattcagag | acagaaaata | ggatggtggt | ttccaggggc |
| 136261 | tggggagtag | ggagttatta | ctgttttggt | atttttttgt | ttttacagat | atcctgtttc |
| 136321 | tacttaaaga | gttattaccg | ttgtcaagct | gggcatggtg | gctcacgcct | gtaatcccag |
| 136381 | cactttggga | ggccgaagtg | ggcagatcac | gaggtcagga | gatcgagacc | acgctgaaac |
| 136441 | cccgtctgta | ctaaaaatac | aaaaaattag | ccgggcgtgg | tggcgggtgc | ctgtagttcc |
| 136501 | atctactcgg | gaggctgagg | caggagaatg | tcttgaaccc | gggaggcgga | gcttgcagtg |
| 136561 | atccgagatc | gcccactgca | ctccagcctg | ggcgacagag | ccagactccR | tctcaaaaaa |
| 136621 | aaaaaaagag | ttattaccat | tgaccatgaa | caacacaggt | ttgaattgca | tgggtccact |
| 136681 | aatatgtgga | tttttttcaa | tcacagataa | aaaatacagt | attcagaggt | tgcgaaaccc |
| 136741 | acatatatga | agggtgggac | atcagtatgt | gtggatttgg | gtatgggggg | ctcctggaac |
| 136801 | caatccccta | catctgttga | gggaggattg | tatttaatgg | atacagtttc | agctggggaa |
| 136861 | gacaaaaagt | gttctggatg | agcctggtca | tggtggctta | tgcctgtaat | cccaccattt |
| 136921 | tgggaggccg | aggtgggagg | attactcgag | cacaggagct | caagaccagc | ttgggcaaca |
| 136981 | tggcaaaact | ccatctctac | caaaaataca | aaaattagcc | aggtatagtg | gtgtgtgtct |
| 137041 | gtggtcccag | ctacttggga | ggctgaggtg | ggaggattgt | ttgagcccag | gaggtagagg |
| 137101 | ttgcagtgag | acaagatggt | gccattgcac | tccagcctgg | gtgatagagc | aagaccctgt |
| 137161 | ctaaaaaaaa | aaaaaaaaaa | agagttctgg | atggattcac | aacaatgtga | atgtacttaa |
| 137221 | tgtgagtgta | ctgaactgga | catgtaaaaa | ttgttaaaat | gataattttt | attatatgta |
| 137281 | tgttgtcaca | attaaaaaaa | aaaacaactt | gtagattagg | caccattttg | gagaatgggt |
| 137341 | tcgggggagc | ctccagtcga | acttccccac | tgcagtgcag | ctggaaactc | agtaactggt |
| 137401 | tctctgacac | ctccccgcca | ctcccacccc | agtgccacat | atccccatct | ccatgcccca |
| 137461 | ctccagtcca | gagccatcta | tcgcctgggc | tactgcaata | actggctagc | ttcccgccac |
| 137521 | accacttcaa | accatacgtg | gctgcctaaa | acctttccct | ggcttcccat | tgcttttagc |
| 137581 | ctgtgagttg | aagtccttgc | caggcaagat | ctgcccctgc | cttcctgtcc | accctcatct |
| 137641 | agagccaacc | tcgtccttgc | tttctgcacc | ccaaccacac | cccaacagtt | ttgcagatct |
| 137701 | tcagacccac | taaaacatgt | tctgcctcag | ggcctttgca | caatgctccc | attgcctggg |
| 137761 | actctgtcct | tcttctttac | tgggtcagct | ccctccRttt | tggtctcaag | agaggtcccc |
| 137821 | cctgcagatt | agctctggtg | caaggagcac | tcttccatag | catcttctct | tttcctcatg |
| 137881 | gcatctcacc | taatacatac | actcacacac | acatttatgt | gtgtgtgtgt | atatgtgtgt |
| 137941 | gtatatatat | aaaacatata | ttttatatat | aaaatatatg | ttttatatat | ataaaatata |
| 138001 | ttttatatat | aaaaaatatt | ttatatatat | aaaacatatt | tttatatata | tatataaaat |
| 138061 | gtatggtaaa | atatatgtaa | caaaaaattt | acaattttca | cctttttttt | tggacactga |
| 138121 | gtttcactct | tgttgcccag | gctggagtgc | aatggcgcga | tcttggctca | ccacaacctc |
| 138181 | cacctcctgg | gttcaagtga | ttctcccacc | tcagcttccc | aagtagctgg | gattactaca |
| 138241 | ggcacgtgcc | accatggcct | ggctaatttt | gtatttttag | tagagacggg | gtttctccat |
| 138301 | gttggttggg | ctggtctcaa | actcccgacc | tcaggtgatc | tgcccacctc | agcctcccaa |
| 138361 | agtgctggga | ttacaggcat | gagccactgc | gcccggccaa | ttttagccat | ttttaaatgt |
| 138421 | acagttcagt | ggcattaagt | acattcacat | tgtgtgtaac | catcactaca | tccattcccc |
| 138481 | agaactctca | tctttcccag | ctgaaactct | gtaattaaac | agtagctccc | cacccagcct |
| 138541 | ccccaagccc | ctggcaccca | ccattctact | tagtctctat | gaatttttac | tactccaggt |
| 138601 | accttaaatg | gaatcataca | gtatttttct | ttttgtaatt | ggcttatttc | acttagcata |
| 138661 | atgtcttcaa | agttcatcta | tgaagctgtt | gttgcatgtg | tcagaatttt | cttccttttt |
| 138721 | aaggctgggt | aatagtcatt | tgtacatatc | acatgttgca | tatccattca | tcttttgata |
| 138781 | aacatttgga | ttgtttccac | ttttgggcta | ttgcaaatag | tactgctata | aaaatgattg |
| 138841 | aacaaatacc | acctatttta | actatacatc | taattgtgtg | cttattcgtt | taaattgtgc |
| 138901 | ctctcttcct | catctctggg | catcacaagt | gttcaccagc | atatcctcag | cacccagcac |
| 138961 | agtacctggg | catcagtatt | caacaagtat | ctgttgaatg | aatgaatgag | acaccaaaat |
| 139021 | atacctactg | gacatataca | gtgtctgtag | tgtgtaagga | agagcagagg | acttgaatct |
| 139081 | ggggcccagc | tcattgattc | ctcattgcgt | gctctgacct | tgaccaaggc | ccttcacctt |
| 139141 | tgtaaaccaa | agagtatctg | agacaaatct | caaccaattt | aggaagtttg | ttttgccaag |
| 139201 | gctaagcatg | cacccatgac | acagcctcag | ggcgtcctga | caacatgtgc | ccaaggtggt |
| 139261 | tggggcacag | catggtttta | tatattttaa | ggagacatga | gacatcaatc | aatatatgta |
| 139321 | agatgtacat | tggttcagtc | tggaaaagtg | gaacagcttg | aagtgggggt | gggggtcttc |
| 139381 | ctggtcatag | gtagttaaga | gataaccatt | tgcattcttt | tgagtttctg | gttagccttt |
| 139441 | ccaaaggaag | caatcagata | tgatatgctt | ttatctcagt | gagcagagag | atgactttga |
| 139501 | gttctgtcta | ttctttgtcc | acaaattatg | aggaaggtgt | gtagtttttt | ttctttttaa |
| 139561 | tcttagtagc | tatttttctt | ggaatagaat | gtgaggcagg | tttgccctaa | gcagttctca |
| 139621 | gcttgactat | tccgttagta | attgacttgg | tcttagtaat | tgacttttcc | catagtaatt |
| 139681 | gacttgccct | tagtaatttt | ggggccctaa | gatttatttt | cctttcacac | cttcaaacct |
| 139741 | cagtttcccc | atgtgtaatg | taggggcact | atcagcccca | cagagttctt | gtcagggtca |
| 139801 | aacgaaacaa | tacatgtgat | aaggttcggc | ttctgaccca | aggaactgct | cagtgaccta |
| 139861 | atctagaggc | cttgatctaa | gtactgaggg | agagaggagg | ctccaactgg | gggagctgac |
| 139921 | tgactggatt | cgaatccagc | ccaaggtctg | ttacccatcc | tctggggacc | ttggctctgt |
| 139981 | attcatttcc | tgtagctgct | ataacaaatt | actacaaact | tcttggctta | aaccacacag |
| 140041 | atttgttatc | tttcaattct | gaaggtcaga | agccataaat | caatgtgtca | gcaggactac |
| 140101 | attccttgtg | gaagcttcca | agaacaatca | atttccttgc | cttttccagc | ttccagaagc |
| 140161 | cacctgcatg | cctgggctgg | tggcctccct | tccttgtgtc | cctctaacct | cttgtttcca |
| 140221 | cctttatgtg | tcctactact | ctctctgagc | tcctgcctcc | ctcgcatcag | gattacatca |
| 140281 | agtccattca | gaaaatccag | gatcatctcc | ccatctcaag | acccatttct | taatcacatt |
| 140341 | tgcaaagtcc | cttttgccat | ataaagtagc | attcagatgt | tccagagatt | aggacgtgga |
| 140401 | cacaggtacc | atctctctcc | catgtgggcc | tcagtttgca | ttttaggaaa | ataagagcat |
| 140461 | tggtcatgcc | ctgtcctccc | tgtcaccctt | gctctgtgga | gttctacctg | aggcaggaat |
| 140521 | attgggtgga | ggccagaggg | ttgggtcctg | cctgcctgac | taccctagca | cccaaattct |
| 140581 | cacaatcttg | tcaccagcag | ttatagcccc | agggcctggc | tgtcccccaa | cccgtgttcc |
| 140641 | agtgccccac | tgttcccttc | catttcctgg | gtgcttctga | ttcaggactt | tttcctggac |
| 140701 | ccttcactgg | actcacaaga | ggggtgccct | gtttattcag | tccaccacgc | tcaatctctt |
| 140761 | gcaggaggga | gcacatgagt | gagtgagtgc | aggatctggt | tggctgatcc | aggtgctggc |
| 140821 | agcagcaagc | tccatgcagg | gccctcggcc | agtctagatg | tgagcgagca | agggcaggat |
| 140881 | ccagccggct | gctctgggca | ctggcaggag | aaatctccat | gtggggcctg | cggcagtgcc |
| 140941 | caggtggggg | tgcccatgac | ccctaagccc | cagagggagt | attacagtgc | tctcctagtt |
| 141001 | ctgctgtcca | tggacggtgg | tgtgttagca | gctcagttgg | ccccttgcat | cgtctcatgg |
| 141061 | ggtggttgcc | ctctgccagc | aagggcaaag | agccagtgtg | acagcctttc | tgggtaccca |
| 141121 | cacttggtgg | gtcccgagcc | cttggccagt | gtccaagaag | aatgaggttg | tgcagacaat |
| 141181 | tgaagaatga | tgaaggtgga | gaattttatt | aagcaatgaa | aacagctctc | agcagaaagg |
| 141241 | ggagctggag | aggaaacagg | aagggccagt | catcttcccc | cgaagtcagg | ccatctcttc |
| 141301 | tgtagtccag | ccatctcttc | ctcaaagtcc | ggttgtctcc | tcgaagtcca | gccatcttcc |
| 141361 | catctactga | ctgagtctgg | ggcctttata | tgcacaggac | ggggagtgca | tgctgattgg |
| 141421 | tttgtgagta | tgcaaaacag | gttaaagtga | agacatcact | caaagatggg | catgacagtg |
| 141481 | tagaaaacca | attaggaaag | ggtaagtata | tgtaaaatag | gtgaagggtg | gggatcaatc |
| 141541 | agaggaaagc | acaacaaatg | ggaagacaag | tcttcaatct | ggtctgagga | tttagcttgt |
| 141601 | agcttggctt | tcaggcttta | aactggcttt | ggcttggaag | tggggtttca | ccagggacca |
| 141661 | gtccctattt | gcctaggcat | ttggctgcct | cctgtccctc | tcatttcccc | ctctgaagag |
| 141721 | gtacaactac | ctgttgttag | aatagggaca | aagacaatct | taactacttc | ctgctgacag |
| 141781 | gggatgctgt | tttgagcaaa | cagcaatcag | agctccctca | gaggcctatc | taagcgtccc |
| 141841 | aggttaaagg | gagccatcat | tcaaggctct | gttcggaatt | tgatggcctc | taagtgagaa |
| 141901 | gaaacagttt | gggttattag | atgacatgga | tcaaaatgga | acaacaagga | ggtaaagaca |
| 141961 | gctcaaaaat | cccaagtctg | ctgacatgcc | cagataacta | gtggctatag | ttatgcctgc |
| 142021 | taagatttgg | atgcatggtg | cttggctttg | gtttgctccc | ttgttttcat | tttcccaaaa |
| 142081 | aaacctccag | attatgagca | ccacatccta | tttactccta | tcagctgcag | gataattgcc |
| 142141 | cagaactaga | atattgattc | atatttttac | attacccatc | ccctctattt | cttctgagct |
| 142201 | acaaccagag | atcactagtt | ggttcacagg | aataagcagg | attaatctaa | aatgtaggca |
| 142261 | aaagcttaaa | aacaactgaa | actagaattt | aatgacaagt | gtatgataaa | ttttgaaaca |
| 142321 | taatttttct | ctctccagtc | ctcatttctg | ttaaaaataa | accatgatag | gactgagttg |
| 142381 | tttgcaaaat | aaactttagt | cttatacttg | gcctggtcat | ttgcataaag | tgcagcaaga |
| 142441 | ataatcattt | tcacataggc | ttttaaaatt | ggctttgatg | gaactctgtt | tcacaaggaa |
| 142501 | tctcaggtag | gaccttttaa | agctgagctc | agccatgggt | ttgtaccctc | aaatacctat |
| 142561 | gagttgggta | aattcttctt | ttcttgaggt | cccagataac | acagggctct | tgggcctgtt |
| 142621 | agaaaatgac | attctctact | caccacaggt | taggaaccct | gtccagggac | tgtgtagaca |
| 142681 | aggtatgagg | ccagttttcc | caaggggatt | ttattggctc | tgcaagtcaa | gcttgattcc |
| 142741 | ctaaaggaaa | gcataccatt | ccagtcaaaa | ccttggtaaa | ataaccggtt | tctccagtta |
| 142801 | tatcctgctg | caaaagaaaa | tagattctta | ttgcactgat | gcaaataact | atattgccat |
| 142861 | aagttaagaa | tatttgcaaa | tagtttccaa | attctagaga | aaccaggcag | agagaaatat |
| 142921 | gctccaaatt | ttcttcacag | gagtatacct | tactcaattg | ttaaaagctg | tagatagctc |
| 142981 | aaaagaagtt | tccttgactc | tggaaaaaac | aaaacaagga | tcagcaatgt | tttaagcaaa |
| 143041 | aagttaaaaa | ggattacttc | agttttctat | tagttcagtt | tattcagtta | actcttgttc |
| 143101 | tgcttgatat | tcaggagaat | ttcagctctt | tatgactcct | gtatgttttt | cctctgttcc |
| 143161 | aatgtcacaa | tctccaaagt | catcagaaac | ctgcatttga | gggcaccttt | caaagtccaa |
| 143221 | tagctgtcca | caaatcatct | tttgaaaagg | gtcaaaacaa | gacaacaatt | gtctgtgaat |
| 143281 | gacaaaatat | ccttgggtag | tcacagtcaa | aaacacaatt | gacaaagaaa | tttgtttttt |
| 143341 | ctctgtggtt | tacaataact | taacacaata | accttaatta | ttactgatag | catatactca |
| 143401 | gacatttgag | ttttagaagg | cccatacaat | taggccgggc | accatggctc | atgcctgtaa |
| 143461 | tcccagcact | ttgggaggcc | gaggtgggtg | gatcatgagg | tcaagagatc | tagaccatcc |
| 143521 | tggccaacat | agtgaaaccc | tgtctctact | aaagtacaaa | aattagctgg | gcatggtggc |
| 143581 | acatgcctgt | agtcccagct | actcgggagg | ctgagggagg | agaatcgctt | gaaccctgga |
| 143641 | ggcagaggtt | gcagtgagcc | aagattgtgc | cactgcactc | tagcctggta | acagcgcaag |
| 143701 | actctttctc | aaataaatcc | catacaattt | tggaacatat | attaatatta | ttcactaaaa |
| 143761 | tataccctga | agaaagtcat | acattatttt | tattttggca | atcccatgta | actaaatgtg |
| 143821 | ttaaataatc | ctgtttacct | ctcttttgga | tgctccaggg | gccttcagta | gcatccaaaa |
| 143881 | gttaggggtt | agaaaagaca | accttgaacc | tgaagtttga | atttgggaag | tctatcaaac |
| 143941 | acattaaaga | tttaaaacac | ttattatttt | gaaatagaac | tccagatcac | cataagttat |
| 144001 | ttattttagc | caaaatgatg | actcaaaaat | tttaaaacaa | ggcaaaaacc | tttcattatc |
| 144061 | ctttattatt | acatgaaaat | cttcttcgag | agaaagtcaa | atttcaccct | tgcatgtaaa |
| 144121 | tccattttca | gtagtctcaa | ttacatgttg | taatggtaac | tcttagcaat | ttttaatttt |
| 144181 | aatgtaaaac | ctggtaagtt | tttttaatta | tgtactaggc | acagataaag | tctgactctt |
| 144241 | tacaacatag | ttaatggtgt | ggttaatcca | tatgacccca | gaccttacca | aattgtaaag |
| 144301 | ctggcaagtc | aaacagttct | caaaagccaa | agaagcagtt | tataacctta | caacatttag |
| 144361 | caaacctagt | atctgacctg | catacattag | accacatatt | ttcattttga | taacatttgt |
| 144421 | attttaccaa | ttatcttcaa | aattgttttt | ctttctcaaa | gattaaagtc | acatgaacta |
| 144481 | aaaggcaata | cagcttttgt | ttttccttca | aaaaatattt | gatctaagca | cttattttct |
| 144541 | ttaagcaaat | tagagctctt | tttttatata | aacatcacac | acaaataaca | catatgtgat |
| 144601 | tacacagaca | gaagattcag | tagttgtaag | atttttcatt | tgccaatctc | ctaattggat |
| 144661 | tattggcctc | agggtggagc | atttcaagaa | gcagagctag | gaaagcatgc | agtttccagg |
| 144721 | gcctaataaa | caggcatagc | tggaagacaa | aaacagattt | tgaaaggggt | ctatctgctt |
| 144781 | ttaattcctg | gggttctata | agaaaaacag | agtttttttt | tttttttcca | aaatgggatc |
| 144841 | cgtggtgact | tctctgtttt | tcccaaggtg | tcttatgctc | tcagaagtta | tcttagggcc |
| 144901 | tctcatgcat | gcgttaagag | tgacaagaca | aattggggaa | aaataattca | gttgactgag |
| 144961 | aaaaaattgt | tttgcagaga | aacaagatcc | atgaagaaaa | aaacacaaag | gccttttaaa |
| 145021 | tatacctata | gcttggatat | ccacttttaa | ttaagctgag | cactctttaa | gataaccctt |
| 145081 | ttaaatccct | tagtacccaa | ctttagccat | gccaagccac | gaatatttct | ggcttttgaa |
| 145141 | ctttaccatt | tctttcaaca | ttttgcacag | ggagagagag | gccagaggcc | cgactggcag |
| 145201 | aaaactttta | cccttctgtc | cacatgttca | caattctttc | cccttctcac | tccatcctta |
| 145261 | ttccactctc | agccttcctc | atctcagtaa | atagccaagc | actcctctct | aattgctcag |
| 145321 | accaacacac | tctggagtca | tcctaattcc | tccctttctc | tcatgtcctc | catctcagca |
| 145381 | aatcctatca | aaacatcctt | caaaagacat | gacattactc | ctcccttttc | accacgtcca |
| 145441 | ctgccaccac | atagccctgg | ttcaagtcat | ggttgcctta | aggctgggcc | attcacatag |
| 145501 | acatctgtgt | caattgtttg | ctttcccttg | tccctagagt | cagatcagat | gctgaactgg |
| 145561 | aaaaagcaaa | taaagtttcc | atttcattca | gagtaaaatc | ccccatcttt | gctgagtctg |
| 145621 | aaccacgggg | ccctgaagat | ctggcctgga | ccccacacct | gccgctccca | gctcactgct |
| 145681 | ggccacactg | gcctcctcct | cgctgtttgt | tcctgaaatg | cactgagtac | atttttgctt |
| 145741 | cagggccttt | ggacctacgg | gtccctctgt | ctggagcact | ccttcctcca | tgttcacatg |
| 145801 | actcccttct | tacctcatta | tggtatcagc | ccaagcatca | cctcctagat | ctttcctgta |
| 145861 | gaagatagta | gcccctgctt | catcactctc | tgtcccctta | gcctgcttca | gttttcttca |
| 145921 | gagcacaatc | atcatcttta | tttgttttct | gtcgtctctc | tctaacaacc | tcccaccccc |
| 145981 | aaactagaat | gtcagctcta | tgacagtagg | gactttttct | tggtcacttc | tgtagctcta |
| 146041 | gaacccagaa | cagcctagca | catggtagat | gcccaataac | taattctgag | cttagttttt |
| 146101 | gaatgaatcc | ccacttctac | cctcctggtc | aaggcaccat | catcccaggc | ctggacttgt |
| 146161 | gaaacagctt | tctaactggt | ctaccttgcc | caattccagc | ctacacgtaa | tcccatctga |
| 146221 | acacaccaag | actgccaatt | gaactgtgac | attcccctgc | ttaaaactct | ttcactgtga |
| 146281 | ccagttgtag | aaacaacatt | ttgtttatcc | atttatccat | ccgtggacac | ttgggttgct |
| 146341 | ttcaactttt | agctatcgtg | aattaatgct | gctgtgaata | tgactgcaca | gatagctgtt |
| 146401 | tgcatccctg | ctttcaattc | ttttgggtgt | gtgcgcacaa | gaggaattgc | tggatcatat |
| 146461 | ggtaattcta | tgtttaattt | tttttcacag | catctggacc | attttacatt | ccccctccac |
| 146521 | tagatatgtt | attatataca | aaggtggacg | gctatacaag | gacattccct | acagcattga |
| 146581 | ctataacagt | gaaatatgag | aagccactta | aattcaatag | aataatgaaa | tagaatcata |
| 146641 | tagatctatg | tacacagata | agggaccatc | tatagtacat | tctgttaagt | aaagcaagca |
| 146701 | aagtgagctg | ggcacagtgg | ctcatgcctg | taattctagc | actttgggag | gctgaggtgg |
| 146761 | gaggatcact | tgagcccaag | acgtcaaggc | tgctatgacc | tatgattatg | ccactgcact |
| 146821 | ccagcctggg | tgacagagag | agaccctgtc | aaaaagaaaa | agaaaaaaga | aaagaaatca |
| 146881 | aaatgcaagg | gaattagggg | ttattcttct | tcctgaggac | tggtgccatg | gcatccagag |
| 146941 | aaagaacatt | ggtggggata | ctgatgaaaa | agaataaagt | ttgtagatta | gttaaaagta |
| 147001 | ttcccttaat | gttaatttcc | tgatttttta | agtaattggg | ctttggtttt | gtcagatgcc |
| 147061 | aacatttggg | gaaactggat | gaaagcatat | gggaaacctc | tttactactt | ttgcaatttt |
| 147121 | tctgttaagt | ctaaaattat | ctcaaaacac | taagttaaga | aaatcaaata | aacttgatgt |
| 147181 | cttaaaacaa | taccaattag | gctgggcgca | gtggctcatg | cctgtaatcc | tagcaatttg |
| 147241 | ggaggctgaa | gtgggccgat | aacctgaggt | cgggagttcg | agaccagcct | ggccaacatg |
| 147301 | gtgaatcccc | acctctactg | aaactacaga | aattagcctg | gcatagtggc | atgtgcctat |
| 147361 | aatcccagct | acctgggagg | atgaggcagg | agaatcactg | gaaccggaag | gcagaggctg |
| 147421 | cagtgagctg | agatcacacc | actgcactcc | agcctggggg | acagagcaag | actctgtctc |
| 147481 | aaaacaaaac | aaaacaaaaa | cacaatactt | atttacttat | acttcaagat | tttgtgagtt |
| 147541 | taattatact | tcaagatttt | gtgagatttt | gcccaagaat | ttgggcaaga | ctcatgattg |
| 147601 | gcccatcttg | gccgggcgtg | gtggctcacc | cctgtagtcc | cagtattttg | ggaggcctag |
| 147661 | gttggaggat | tgtttgagcc | caagagttga | agaccagcct | gggcaacatg | gcgaaacctc |
| 147721 | ctctctacaa | aaatacaaaa | attagctggg | cgtggtggtg | cgtgcctgta | gtcccagata |
| 147781 | ctcagggagg | ttgaggctgc | agtgagccat | gatggtgcca | ctgcactcca | gctggggtga |
| 147841 | cagagtgaga | ccctgtctcc | taaaaataaa | aaataaggta | aaataaagat | tggcccatct |
| 147901 | accctcaaca | gttgcctgga | ctccctgggg | ctcagtgcac | ctagatgctg | gactcggata |
| 147961 | accatctgat | ctttgatgta | gtggacagac | actttgttct | tgccatcatc | tttggtacct |
| 148021 | gagatagaaa | gccttaaaga | gaggccacgc | ccatgattaa | gtttcaggtc | aaaacaacga |
| 148081 | gcaaaaaggc | aacggctata | gttgtaggtg | tagcaaatca | gtgtgccttt | tatctagagg |
| 148141 | ctactgaaaa | ccagacattc | attaaagata | ttctggtcac | ttggatgaag | gctggccttg |
| 148201 | gcattcacct | gaatctttag | tagagtcttt | agcaccattg | gcaactcagc | cagacctggc |
| 148261 | cttggccacg | atagtggagc | ctgggattgg | agggcatgaa | ttttatgaag | cctgtaatat |
| 148321 | cagaaattcg | ttggttgagg | acatacctct | ttctttttgg | accctgtggg | cgtaatgcta |
| 148381 | ttgatacatg | tgcagaggag | gaattaatat | gactgtgatt | gacagaataa | ttatgaagtg |
| 148441 | caaagacctc | agatctgtga | tcagcttcca | tagaagtatt | tgctcagaag | cttctcagaa |
| 148501 | acattctcat | gattgaagaa | gccttgaaga | gcccgtattt | ctgtctatga | aatctcctgt |
| 148561 | ttattgtact | atgaggaccc | atcagaaagt | aactgaggta | gtgctgattt | cctgagcaat |
| 148621 | tattcagtcc | actgtctcaa | atccatcatg | cagaatgttc | acagagggta | aagtaagttt |
| 148681 | gactattata | actactcact | tttataagtg | atttaattta | aagattaata | tgataagtac |
| 148741 | tctgtttttc | ctgggaattt | tgttgtagaa | agagtaactg | ctgtgtggct | aaactaaggt |
| 148801 | tataagccaa | attgtttcct | cagagtttaa | gaaacacaat | actaactctc | atgggtttac |
| 148861 | tagttgtctg | ttgctgcata | acaaatcatt | ccataatttt | gtggtgtatt | gctgcagaca |
| 148921 | atgttaaact | aagtggatga | aaaggatatt | cacatagtct | cagagtgtct | ccctacaagg |
| 148981 | taggattact | aacaaaggga | aactaataat | tatatagtaa | ggaaatctcc | ttaacccaat |
| 149041 | aatcaccagc | aataagatgc | agcaaccctc | atcatgtacc | tcttgatatg | atgcactgac |
| 149101 | aaaagcacct | ctcttctcta | attttcttgc | caaaatgcat | aagctcaagc | taattacagg |
| 149161 | aaaatataga | caaacccaaa | ttgagggaca | ttctgcaaaa | taactgaaca | gtaattctcc |
| 149221 | aaaagtgtca | aggtcataaa | agacaaagac | attgaggaac | tgtcacagat | tggagggaga |
| 149281 | ctaaggggac | atgacaacta | catgcaacct | ggaatcatgg | actgaatcct | gggccagaga |
| 149341 | aaggacattg | ggggggaaac | tggtgtaaag | ggcataaagc | ttgtagatta | gttaacagta |
| 149401 | ttgcctcaat | attaatttcc | tgattttttt | aagaactggg | ctttggttac | ataagatgcc |
| 149461 | aatatttggg | gaagttgcat | aaaaacatac | gggaaatctt | ttgacgatgt | tttgcagttt |
| 149521 | ttctgcaaat | ctaaaattat | ttcaaaacaa | aaagtttaaa | aatcaaatac | acatagttgc |
| 149581 | ttgaaatagt | aactatttta | ttatattcca | agatgttgtg | agtcaggaat | ttggccaaaa |
| 149641 | ctcaggtggg | cgattcttct | gcaaagaccc | ccacaacaca | ttcaaagtca | caggcagagg |
| 149701 | ttgttggggg | agggcattga | aaagaagaga | agagtcatag | gtgggtgcaa | tggagggagg |
| 149761 | gcagagggct | gctgactatg | gtgcaggact | catccataat | ggagccctgg | ggaggcaagg |
| 149821 | gcttcataac | tagacactgg | tcttgtcacc | tcagactcac | ctgtagcagg | accagatact |
| 149881 | gaggtcagac | tgaaaacaca | ggctctgcct | caggagaggc | tctctactag | ctgagtaaat |
| 149941 | gatgacagta | ttggaaatgt | tcccaacatc | ataatgggaa | aacatcactt | cacactacat |
| 150001 | aagcaataca | caggggcagt | gccggtcgtc | ttcccaggtt | agtagcagtt | ctactgcctc |
| 150061 | caagagtgtt | ggagaaatac | aaaccaagca | ttaggcactt | ttaacttgaa | aacatgaagt |
| 150121 | tctctttcct | aactttcttt | gtttccttat | ttcttcttct | tcttcttctc | cttcttcttc |
| 150181 | ttcttcttct | tcttcttctt | cttcttcttc | ttcttcttcc | tcttcttctt | cttcttcttc |
| 150241 | tttcttcttc | ttctccttct | ccttttcctt | cttctttttt | tgctgagaca | gggtctcact |
| 150301 | ctgacagtac | agtggtgcca | tcacagctca | ctgcagcctc | gacctccagg | gctcaagcaa |
| 150361 | tcctcccagc | tcaccctccc | aaatggctga | aactacaagc | tcgcaccacc | atacgtggct |
| 150421 | aatttttcta | tttttgtgtg | cagatgaagt | tttcctatgt | tgcccaagtg | gtctcaaact |
| 150481 | cctgggatca | agtgatccat | ccacctcaac | ctcccaaaac | gctgggatta | caggtgtaag |
| 150541 | ccaccacacc | cagcccacta | acttttttat | atcggctaat | gaaatagttt | taagtttaga |
| 150601 | ccctacgagg | cataaagaaa | taattttagt | tatgttatca | gatgtacagt | aatactcaag |
| 150661 | tgtgcaactg | tggataactt | gagttcatga | ggtttttgtt | tttttgtcaa | aagaataaat |
| 150721 | ttatagtgaa | actacccaaa | aaagcaaagt | acagaacagt | atgctaccat | ttgtgcacag |
| 150781 | aaatgggata | tatatggtgt | aactgcatcg | aatttactgg | atgtatgtcc | agggaccaga |
| 150841 | actcttggtg | gcttcatgtt | catacttttg | caagcacatg | tgtagtatcc | ttaacttaaa |
| 150901 | ggtactgttg | tatacattct | agtgttatca | aaatttacat | acatattatc | aagtcagaga |
| 150961 | ggtcattctg | tgtcttagta | ttttcacttc | atatttggta | tatttatgta | tgtatacaca |
| 151021 | catacctata | tgtatttaaa | taagatttat | agtcacatgg | tccaaaaatc | aaaacaatgt |
| 151081 | ggaaaggttt | acagagaaaa | gtctcaagcc | taatcctgtt | ctctactgcc | aggtgaccat |
| 151141 | gttattaatt | tcttttcata | ccttgccaca | gaattttcac | ctgcaaacac | agatattctt |
| 151201 | ttctttttta | atgacagagt | cacgttctgt | tatccaggct | ggagtgcagt | ggcgtgatct |
| 151261 | tggctcactg | caaactcctc | ccgggttcaa | gtgattctcc | tgtctcagcc | tcctgagtag |
| 151321 | ctgggattac | aggcatgtgc | caccacaccc | agctaatttt | tgtattttta | gtacagatgg |
| 151381 | ggttttatca | tattgaccag | gctgatgtcg | aactcctgac | ctcaagtgat | ccgcctgcct |
| 151441 | cggcctccca | cagtgctggg | attacaggcg | tgagccacca | cgcccagtca | acacagacat |
| 151501 | tcttactcct | tttttacaga | gaatttatta | ttattatttt | ttacatagca | tttttctgca |
| 151561 | cctttctttt | tccacttaac | aatgcacttg | aagatttttc | catatttgta | catcaggagc |
| 151621 | tttctctttc | tttgttacca | cattaaattc | cactgggtag | atgtaccata | atttaactgg |
| 151681 | gtccttattg | aaagacaatt | gagctgtctc | ctagacaaag | ccttgtgcac | cttcccKaac |
| 151741 | agagggtcta | accaagcagg | caggatgggg | ttataaagta | ggtggggagg | tgggagagac |
| 151801 | tccaccttcc | caggtgggct | gagaatggag | gtaaggccct | gcaacaggac | agagggaaaa |
| 151861 | gtggggatga | gaggtgggag | gcgagatagc | gcccactgtt | ctcgctcagc | cccctcctcc |
| 151921 | gtttgccgct | gacctgttgg | cctcccccaa | cctctgagcc | tgcctctgcc | taggtaattt |
| 151981 | cccaagaccc | agaaggggtg | aagggtgagg | tgtgattgcc | cccacctcct | tgcctcccgc |
| 152041 | agcatctgct | ccgggaccat | gaacaatagc | tgacagctcc | atggcccttg | ctgtccccat |
| 152101 | ctcagcttcc | ctgggcatct | aaacctcagY | tgccatgggg | taggaggaca | ggctgaggaa |
| 152161 | gcagaagcct | gaggctgtct | agagtctcac | tcctgcatca | gcaggccacc | acctgtggtt |
| 152221 | cctccttgtg | caaatttgaa | aagaattgca | taaaacactg | gagaaatcca | agaggggaag |
| 152281 | tccacaaggg | cggtggctcc | ctacaaggtc | acagagcaag | ctggtgtcag | aRcctggacc |
| 152341 | tacagcgctg | ttggtggagg | tcctgcctcc | aggtagggga | agggctccct | ctcacctcta |
| 152401 | cacgcagcgc | atttcttggc | tcagctgccc | tgtaggggat | gcagggtggg | gacagcagag |
| 152461 | atctgggcct | gggagggaga | gagtacacaa | tcacatggct | gttgcccctg | tctcaggcct |
| 152521 | tgtctacctc | tgactgtggc | tctctggcag | gaatagatgg | acatggcctg | gcagatgatg |
| 152581 | cagctgctgc | ttctggcttt | ggtgactgct | gcggggagtg | cccagcccag | gagtgcgcgg |
| 152641 | gccaggacgg | acctgctcaa | tgtctgcatg | aacgccaagc | accacaagac | acagcccagc |
| 152701 | cccgaggacg | agctgtatgg | ccaggtgagg | gcagcctggt | gtaggacagc | atgcacacag |
| 152761 | gtcagagggt | gatggcacga | gcaatggcag | gtccagtgtg | gtcagaacca | agggtgccgc |
| 152821 | tgctgacaag | gaaggggagg | ggcggccagg | gccaccatgc | cacaggtaag | gccactgagg |
| 152881 | cagcttgggg | aatatgagct | ccaatttgaa | ctccaggctc | aggagtgtgc | ttgtatttca |
| 152941 | ttcctctggt | ctcctggcct | gctccctaca | aggtttcaca | ttcccagagg | gctggggatg |
| 153001 | tgcctaggga | gagactgtgg | cgtggacaca | atctgtgggt | taaagcgaag | acaggacagc |
| 153061 | ctggaagccc | catgacatct | gagtcactcc | caacattcca | tttgcttatt | tttaaatcgg |
| 153121 | ggttaaaaaa | aaaaaacaaa | tacataacat | acattttcca | ctttagccat | ttttaactgt |
| 153181 | acggttcagt | ggcattaggt | atgctcatgt | ggttgtgcaa | ccatcaccac | catccatctc |
| 153241 | ctgacctctt | tcattctcca | aaactgaaat | ggaaactctg | tgcccaccac | ttcatttgct |
| 153301 | tttcagaacc | ttctagagca | catcctcctt | gccaggaaat | ggtgtggatg | tagacctttg |
| 153361 | agagagacag | atgactatca | ttctcagggc | catgagctat | atgagagtga | tgatatttgt |
| 153421 | tgagccctta | ctatagcaag | ggagttcttc | tcattgtact | cagtaactct | tttggaggca |
| 153481 | acaacccttg | accctgacag | gcaggaccca | tgtctgccaa | accctaagac | ccatgatgtg |
| 153541 | caaggggtct | tgcaggaaga | ccaagagttg | gaacatccaa | ggaaaagcaa | gtgtgaagtc |
| 153601 | gggctggcag | ggaagcatgt | tctgtgtcag | ccggcactgg | gcgtgggcca | gggtgtggga |
| 153661 | ggtgggtagg | tctggctccc | ctcccatgga | tttccctatt | gtttctcctg | ggtgctcagg |
| 153721 | cctgtcacgc | ctctgccatc | acttgaccct | aggtgcaagg | gttcagccca | gaaattttat |
| 153781 | gcaattgaYt | catgatttct | caggttttct | gaRtcctggc | ctagagtgac | ttcccaagaa |
| 153841 | aaaMctccac | catttctgct | tgtcttacct | gccttgtatt | tacctttcta | ggattgcctt |
| 153901 | ttccacattt | agtcaagtct | aggttcagac | ccacgtgcag | gctatagctc | cttcgttctc |
| 153961 | caccactctc | aggatctatc | tagagtctcc | ccacctggac | ctccagaccc | tgggagagcc |
| 154021 | agaccagccc | cttgacctcc | accctccccc | acaacctggg | ccaggttcct | ctcctccctg |
| 154081 | tcctcagtta | taattttttt | tttttttaat | ttgaggcaga | gtttcgctct | tgttgcccag |
| 154141 | gctggaatgc | aatggcatga | tcttggctca | ctgcaacctc | tgcctcctgg | gttcaagtga |
| 154201 | ttctcctgcc | tctgcctcct | gagtagctgg | gattacaggc | gcctaccact | gtgcctggct |
| 154261 | aattttttgg | tatttttagt | agagacaggg | tttctctgtg | ttggtcaggc | tggtctcgaa |
| 154321 | cttctaacct | caggtgatcc | gcccgcctcc | ttaaatctta | acctcactgt | ttaccatggg |
| 154381 | tgtagcttac | ttaaactctg | taaaaatggg | ggtaaggatt | cgtactgggt | tgttgagagg |
| 154441 | ataaagcgca | aaagcctcag | ggactttgca | cctatggttt | tctatgccta | gagtgttctt |
| 154501 | tgtctccctt | ctacacacag | cccacccacc | cactaaaacc | ataccctccc | tgagggtaga |
| 154561 | ggtgttattt | gttttcttca | ctgtggtgtt | cctaggacct | agcacagtgc | ctgatgtata |
| 154621 | atcagcactc | agttaatatt | ggctggatgc | aaaatgaata | atataaataa | gctgaataac |
| 154681 | atgaaatagg | ccgaacgcgg | tgactcacgc | ctgtaatccc | aacactttgg | gaggccaagg |
| 154741 | agggtggatc | acctgaggtc | aggagttcga | gaccagcctg | gcaaacatgg | tgaacccccg |
| 154801 | tctctactaa | aaatacaaaa | ttagctgggc | atggtggcac | gtgcctgtaa | tcccagctac |
| 154861 | ttgggaggct | gaggcaggag | aattgcttga | acccgggagg | tggaggttgc | agtgagccaa |
| 154921 | gatcacgcca | ctgcactcca | gtctgggcaa | caggagcgaa | actctgtctc | aaaaaaaagt |
| 154981 | tagtttaata | acatgagatc | actttttaaa | ccgttaagag | ctgtactact | aataattact |
| 155041 | ctctcagaca | gtggctctcc | ctcatctcct | atatcccgtg | gattaccctc | tgttaaaagc |
| 155101 | caaaattaag | caggcatggt | ggctcacgcc | tctaatctta | gtattttggg | aagctgacat |
| 155161 | gagccaagga | gtttgagacc | agcctaggca | acatagtgag | accccatctc | tacaaaaata |
| 155221 | ctttatatta | gccaggcatg | gtggcatgtg | cctgaattcc | agctcctcgg | gaggctgagg |
| 155281 | tgggaggatt | atttgagccc | aggatgttga | ggctgcagtg | agctatgatc | acaccactgc |
| 155341 | gctccagcct | ggtcaacaga | gcaagaccct | gtctcaaata | aataaatgaa | taaatagggc |
| 155401 | ggaaagcacc | aatattgtaa | ttgcctccgt | ccccaggtgg | gagctcctca | agggccctcc |
| 155461 | ccaggaagtg | ttcctctgga | tgacctacct | ggggcagagg | agccagaata | tggaggagat |
| 155521 | ggctgtggtg | gggagagact | tagtcctgtg | tcttccccac | ccagtgcagt | ccctggaaga |
| 155581 | agaatgcctg | ctgcacggcc | agcaccagcc | aggagctgca | caaggacacc | tcccgcctgt |
| 155641 | acaactttaa | ctgggatcac | tgtggtaaga | tggaacccac | ctgcaagcgc | cactttatcc |
| 155701 | aggacagctg | tctctgagtg | ctcacccaac | ctggggccct | ggatccggca | ggtatgagtg |
| 155761 | ctgttcccac | aaacattaac | ctcagcagag | ggcggagcct | gccagttgct | ggcagggagg |
| 155821 | gcttggtcca | ggaattcggg | tctgagggtg | gtggacgccc | tgccccctcc | cacagctctg |
| 155881 | gtccccttca | agggtaaagc | tgctgagata | cgtggctgac | aggagtattc | tgtctcctcc |
| 155941 | ccactcaggt | caaccagagc | tggcgcaaag | agcgcattct | gaacgtgccc | ctgtgcaaag |
| 156001 | aggactgtga | gcgctggtgg | gaggactgtc | gcacctccta | cacctgcaaa | agcaactggc |
| 156061 | acaaaggctg | gaattggacc | tcaggtgagg | acctgaggag | ataagatgag | gagtgggagt |
| 156121 | ggggctttgg | ggttgggagg | ggtgcggtct | ggcccagaag | ctaagggtct | tacgttctcc |
| 156181 | tccctcaggg | attaatgagt | gtccggccgg | ggccctctgc | agcacctttg | agtcctactt |
| 156241 | ccccactcca | gccgcccttt | gtgaaggcct | ctggagccac | tccttcaagg | tcagcaacta |
| 156301 | tagtcgaggg | agcggccgct | gcatccagat | gtggtttgac | tcagcccagg | gcaaccccaa |
| 156361 | tgaggaggtg | gccaagttct | atgctgcggc | catgaatgct | ggggccccgt | ctcgtgggat |
| 156421 | tattgattcc | tgatccaaga | agggtcctct | ggggttcttc | caacaaccta | ttctaataga |
| 156481 | caaatccaca | tgtgtcttgt | gtcttgtaat | ttcgggacga | gtgggttgga | gggacacatt |
| 156541 | gcttcatctt | ttccattgac | aggccccaaa | ttgggctgga | actagcctaa | tgttcactgg |
| 156601 | gaaggagggt | gtgggggttg | agctagaatc | caggtatctg | atccgttagt | ctgggtctct |
| 156661 | tacccctgca | ctggcttccc | cctcatgcca | agctcatccc | accggcacta | cacatggaga |
| 156721 | aagacacaga | cggagtgaag | aagggcagag | atagccgatg | agttattggg | cttcaagttg |
| 156781 | ggaagagagt | ttctttagtg | atgtgggctg | ggtggagata | ttggtgggga | ggagggtctt |
| 156841 | gatgaacact | tgccttgttt | ccatttattt | atttatttat | ttatttattt | atttatttat |
| 156901 | ttgcgacagg | aatcttgata | tattgcccag | gctggtcttg | aactcctgtg | cccagacaat |
| 156961 | actccctcct | tggcctccca | gagtgctggg | attataggca | tgagtcactg | tacctgacct |
| 157021 | gctttttaaa | aaaaaatgac | aactaatgtt | gcaattaaca | atcttttact | tagtggaatg |
| 157081 | ttatacttaa | attccagaaa | ggattattgg | gtcaagagta | catataattt | tgagagttac |
| 157141 | aactttatgg | gggttgtatc | aatgtgcctc | ccccaccagc | aaagtatgag | agtgcctctt |
| 157201 | tctccactgg | gtgtgatggc | tcatgtctgt | gatcccagca | gtttgggagg | ctgaggcagg |
| 157261 | agaatctctt | gagcccagga | gttcaatatc | agcctgggca | acatggtgaa | accccaactc |
| 157321 | tacaaaaaac | taaaaaatca | gctgggcatg | gtggtgtgtg | cctgtagtcc | caactactag |
| 157381 | ggaggctgag | gtgagagaat | cgcttgactc | ccagcaggct | gcggttacag | taagctatga |
| 157441 | tcatgccact | gcactccagc | ctgggcaaca | gggcaagaca | ttgtctcaaa | aaaaaaaaaa |
| 157501 | aaaaaagaga | gagagagaga | gtgcctgttt | ctccacaacc | ttgtcaaccc | actatgccat |
| 157561 | taaactttgg | ttttctgctc | atcttacagg | tggggaaagg | gcagctcagt | gcagttttca |
| 157621 | tctgccattg | ttctgagatc | tttccatatt | gacctattga | tatgttaaat | taccaggtag |
| 157681 | taatccattc | taggtgtaca | ttacattgaa | ttcagtctcc | tactgatggg | cattggaagg |
| 157741 | aatggggttc | ttttatgatc | ctgacattgc | tgaaagccac | aggccagtta | tttagtagaa |
| 157801 | tactcctcca | tttgggtttg | tctgtttcct | catgattcat | tgaggttatg | cgttttgggc |
| 157861 | acaaataccc | tacatggtta | tcccgtgcat | cataatggga | ggcatgtggt | gtggggtttg |
| 157921 | ctcattcctg | gtgacgttaa | ctttgatctt | tttcttgaga | ttgtgtctgc | caggtttctc |
| 157981 | cactacactt | tcccctttgt | aactagcaaa | tatgttgtag | agagagactg | gagaactaga |
| 158041 | gatactctat | tcatcagcac | acttccacct | atatgttcta | gtagctgatg | gaccttaaac |
| 158101 | atgtcttact | atgttacagc | tctttcacca | acccttcaat | acttttcagt | ggtatcaact |
| 158161 | gtaaaaacca | aacttcttca | caatagcaca | gaagaccatg | cccctccttt | gagccctcaa |
| 158221 | gccaaatctc | tcccacacca | ccccataaat | gagctccagt | cacatttctc | atgttggggg |
| 158281 | tctttgctcc | agcaactctt | tctctgcatg | cctgaaatgt | tcttcattaa | tcctctgcag |
| 158341 | cctagcactt | tgtggccact | tagatcacaa | cctacaatcc | ccccctaaaa | tgacttctga |
| 158401 | ccactcaaac | tgacaaaccc | acccagctga | tttctcatca | cactactcta | tgtccttgtg |
| 158461 | cagattttta | tctactgtgt | ttgttgtcag | ccttttccct | aacaaaacat | actctcccga |
| 158521 | aagcagggtt | gtgtctgtgt | cattttatgc | tacatcccca | gggtctgggt | cagtgcctgg |
| 158581 | caccgagaat | gtgctcagta | agttaaggaa | tcgctgcatc | cattctgtca | gtcaacaatt |
| 158641 | ccttctgagc | atccagtcca | ctggcccatg | ctggtctcag | ccaacagaaa | gggaattgag |
| 158701 | ttccttgcaa | ggtctggtgg | ggacagacag | ttctgagaac | cagtgactct | tagaacaagg |
| 158761 | agatgaggct | ttcacagagg | gaagcacaga | gtgtggtatt | attctgctga | agcccaaaga |
| 158821 | ggtcagggaa | ggattccaaa | ggagtaatgt | ttgccaagca | caaaacagca | cagggaatgg |
| 158881 | cattccatgg | acaggtctca | gcaagtgcaa | aggcttagag | gtaatagaag | tgcaagcaga |
| 158941 | attccagggt | ggctaagaga | ggttgtgtgg | ggaatgggca | gcagttaagg | ccaaagaaga |
| 159001 | aacactggat | ctgcattcct | taggacggtg | ccctgtgggc | ccctcacaga | gcttctctcc |
| 159061 | tgcaactgct | aggtataaga | aggcaggctt | agaatcggac | tgagatcagt | agtttctgca |
| 159121 | gctgggaaga | tgagtgaggt | gagattgcat | gtgtgatagg | ctggcactca | gggaagacct |
| 159181 | cagggttctc | tcctccccac | tctgaggccc | ctctcctgct | tcctgaagcc | cagagtctcc |
| 159241 | acctctgtga | gccaaacacc | ttcctgttat | ctgcctggtc | ctagggtagc | cttcgggttg |
| 159301 | gggttagaag | gaatgccaat | ggttaacctt | gtggtattaa | gcttccagct | caggcagata |
| 159361 | ctctctggac | tggttcaagc | tgactgcctg | actgtccctc | cctgctggcc | ctagcaccca |
| 159421 | gactccagat | aggcacacca | cctcaccctt | cagagcaggg | ctctgagact | ccacaagtgg |
| 159481 | tgaggactta | ccagaggaac | tgaacttgac | ctccaaccca | accttccatt | tgctggtatt |
| 159541 | attctgaagc | cctcatggcc | caggggcctg | cctcaggtag | caggtctcac | tcctgcagtg |
| 159601 | gaggggccat | aaagttcagt | tcatgatcag | cccccaagcc | aggggcagcg | gatgacaggg |
| 159661 | caggagttcc | atctagagga | gctcctgtgt | tcaggcgttc | ctagacacct | gcctgccctt |
| 159721 | ctcccatcag | cactggggta | taaagaagga | aagaggcctg | aggtttccag | aggcctctac |
| 159781 | ctgctgaggt | cttaagagga | ctcaaccctc | tgggaaatac | aaataaaatc | ctcaaccctc |
| 159841 | caaacaactg | aatggacacc | tcttggccaa | agagaccccg | gaaaaacttt | aaaatccaag |
| 159901 | tttcctggcc | gtgatgatag | gtcactcaca | cctcagcaca | cctgcttcct | cacgaaccgt |
| 159961 | taccaggctt | ctttcccaag | agctaaacag | aaaccagccc | tgaaaaccaa | gaacaggaga |
| 160021 | ctccttcact | gatttcaatt | tcaaccaatt | ccgagactcc | cttccctttc | ctgattttga |
| 160081 | catgacagct | gatcagctta | caaaacattc | ctggctgatc | aatgactctc | aaccatggac |
| 160141 | cagttctggc | tggtttacag | aggcagcaca | caaagtgctt | tgggtcctgt | gtttcacatt |
| 160201 | ttgacataca | gagcctaatt | caactgcatt | ttaatgtctc | caccccgaag | tgaatatggg |
| 160261 | acatatttaa | catgttttat | tggtacacat | gtgtgcaact | ctcatgaata | ttcataaatc |
| 160321 | ctcttaaaac | ttattaaata | tatatgttta | gccaactgat | ttagtgtaaa | acccctgtcc |
| 160381 | cttcaattcc | tagcttgtag | gttgcaaccc | atcaaaagaa | ataaagctct | cttttccaaa |
| 160441 | tgtaaagatc | ttatgatttt | aagccaatat | aattgaagac | aagagtagga | tccatggagc |
| 160501 | agcccaggtt | cccccagcct | aagtgaatgc | acaggtgcca | ggtggagcca | ttgacagctc |
| 160561 | atttgtctcc | ctgacagctt | tgggaggaag | gtgggtaagc | tctccccgat | ctaagatctc |
| 160621 | tcacttttga | attgagatct | cgaggacttc | atttttttac | cctgatcccc | tccatccgga |
| 160681 | ccctgcaagt | gccatctttg | ttggtcccag | gtttctagat | ggggaggttg | ggggcagtta |
| 160741 | agcctgactc | atccggcgca | tcagcccatc | aggtttggtg | aggatgcttg | ccctctagtg |
| 160801 | gcacacgaag | gaatgtctta | tgcttttctg | gggaatctag | attctaagga | gacagtccca |
| 160861 | gaccagctgc | catcaggaac | atgcatgttt | cagaattatg | agaaaaagtc | ttgtgaatat |
| 160921 | tttggatcct | ggaaaaaagc | taacctggaa | caatataaag | atttataggc | caaaatggag |
| 160981 | aacttttggc | agaatgtctg | acatgcctaa | attagtttat | ttgcatgcac | aatagggttc |
| 161041 | aggacctctc | agaagcaatg | ggaggtcttt | tttttttttt | tttttttgag | acagagtctc |
| 161101 | actctgtcat | ggggagtgga | gtggagtggc | acgaacatgg | ctcactgcag | cctcgacctc |
| 161161 | ccaggctcaa | tcatcctccc | acctctgcct | ctcaagtagc | tgggattata | ggcatgcacc |
| 161221 | accacacccc | actaatttct | ttattttcaa | tttttaattt | tttatagacc | atgctggtct |
| 161281 | caaattcctg | gactcaagga | atcctcccac | gggagaccat | ttttcagtgt | tattatgaga |
| 161341 | gctctaaaca | cagttgggag | tctcagataa | cctccttaaa | tgagactaat | tcaaaactga |
| 161401 | aggagtctaa | ttcaaaactt | gaccagcata | ttcaaaccta | tctgccacta | ttggacaggt |
| 161461 | agctgaagac | actgcaaaaa | gccttatagc | ccaacaaatt | gaattccctg | gctcaagtag |
| 161521 | taatagataa | tttaattgct | tcagattttc | ttttacccaa | acaaggaaga | gtctgtgcag |
| 161581 | tggcccataa | cacctgttgc | acttacatca | acacttcagg | tgaagtagaa | actcatatag |
| 161641 | ggttgggcac | agtggctcac | acctataatc | ccagcacttt | gggaggctgg | ggagggagga |
| 161701 | ttgcttgagc | tcaggagttt | gagaccagcc | tgagcaacat | ggtgaaaccc | tatctctaca |
| 161761 | aaaactgcaa | aaattaacca | ggcatggtgg | cacatgcctg | taatcccagc | tatttgggag |
| 161821 | gctgaggcaa | gaggatcact | tgggcctggg | aggcataggt | tgcagttagc | ctagatcacg |
| 161881 | caattgcatt | ccaaactgat | aaagcaagac | tctgtctcaa | aaaaaaaaaa | agaagaaaaa |
| 161941 | ctcatacaga | aagaatttcc | aaacaagcta | aatgattaca | agaaataaaa | ctactgatcc |
| 162001 | tatcaatgat | ctgttcagtt | ggctttctac | caaacagaaa | ttcctttcaa | gatgctattg |
| 162061 | aaggctgggc | gtggcggctc | atgcctgtaa | tcccaacact | ctgggaggct | gaggcgggtg |
| 162121 | gatcatctga | ggtcaggagt | ttgtgaccag | cttggccaac | atggtgaaac | cccgtctcta |
| 162181 | ctgaaaaata | caaaaaatta | gctgggtgtg | gtggcgacac | ctgtaatccc | agctacttgg |
| 162241 | gaggctgagg | caggagaatc | gcttgaacct | gctaggcgga | gattgcagtg | aaccgagatc |
| 162301 | acgccactgc | actccagcct | gggtgagagt | gagactccat | ctcaaaaaaa | aaaaaaaaaa |
| 162361 | aaaaaggtgc | tattgaagtt | tttgttataa | ttatagtctc | catcaaactt | ttcttcataa |
| 162421 | catttaaatt | acttataata | tgggacaggc | atgggggctc | aagcctgtaa | tcccagcact |
| 162481 | ttgggaggtg | ggcagatcat | ttgaggtcag | gagttcaaga | ccagcttggc | caacatggcg |
| 162541 | aaacactgtc | tttactaaaa | atacaaaaat | tagccgggca | tggtggcatg | tgcctgtaat |
| 162601 | cctagctact | cgggaggctg | aggcaggaga | attgcttgaa | cctgggaggc | ggaggttgca |
| 162661 | gtgagccgag | atcacaccac | tgcactccag | cctcggcaac | agagggatac | tctatctaaa |
| 162721 | aagtaaatat | aaataaataa | ataacttata | atatgtataa | ccaactgctg | taagtctgct |
| 162781 | gctaaaacca | gaattatgct | ggctcaatgc | atagaactta | tagacaagtt | aaattggtag |
| 162841 | ccctaccttt | tggcctttat | attgcttgat | agaccttagg | ggttgatgag | tacctgccca |
| 162901 | cctctatttc | tgtctggcca | agatgttcaa | ttggctgtaa | gtctcttggc | cacaagggtc |
| 162961 | ccaccaaggg | actggatgga | tctggagcag | gtagcctcag | catcctggca | acgacatggt |
| 163021 | acaaacaatt | tggccattga | tgctgactgt | ggcagatctt | ggctaaaagg | aagaaatgtg |
| 163081 | gaataaaaag | aaaatccaaa | gacccctcaa | ctgactgaac | aaacccctct | tggccaagga |
| 163141 | gaccccagaa | aaactttaaa | atctaggttt | cctggctatg | ataagacagg | aggctggtca |
| 163201 | cacctcagta | taccctcttc | cttactgtta | ccaggctttt | ttcctaagag | ttaagcagaa |
| 163261 | tcctgtcctg | gaaaacagag | aatggaagac | tcctccgctg | acttcagctt | caactgcctg |
| 163321 | atgccatggc | cagacttcac | tctctttttg | tgatttgaca | cgacagctga | ccagctcaca |
| 163381 | aagctatcct | tcctgatcag | ttcctgttaa | ccatgggctg | gttctggctg | gtttacagag |
| 163441 | gctgcacaca | aagtgccttt | gtgtcctatg | tttcaccttt | tgatgtgtat | ggcctaagtc |
| 163501 | tgcattttaa | tgttaagtct | cagctgggta | tggtggctca | atgcctgcaa | tcctagcact |
| 163561 | ttgggaggcc | aaggcaagag | gattgcttga | gcctaggagt | tcaagaccag | cctaggcaac |
| 163621 | atggtgagac | cttgtctcta | tttttttaat | taaaaacaaa | atacaaatat | aaaaataatt |
| 163681 | actgttaact | ctccacccca | aagtgaacac | aggatgtatg | taacatgtat | gtttgcttag |
| 163741 | tatacatgca | tgtgactccc | tttcatgaat | attcatagct | cctcctataa | cttattaata |
| 163801 | agtatactag | ctaacctatt | tagcataaaa | ctcctgtccc | acctctcctc | cctcaaagtg |
| 163861 | cctgctttcc | atctcagcca | gaggctccac | ttcccagcct | gcaggttaca | acacaatatt |
| 163921 | agtaaaagtg | ttctttccaa | gtgtatacat | ctggtgattt | taagttgata | cttcccaggt |
| 163981 | tgtccaagat | tcaggtacag | ctcactattg | caggatacaa | gctgggatct | cctgggagtt |
| 164041 | ggtctctttg | caaatcgtat | tatctctgta | tcacctttta | tgaaatccta | aaagaattta |
| 164101 | aatctgaaac | atgtgactcc | aaagattttg | aataaggaat | tgtgaaccca | tggtaaactc |
| 164161 | ctggcttaag | ggtgtccaat | tttttggctt | ccctgggtca | cattggaaga | ataagaaagt |
| 164221 | ttaagaaagt | ctgtgaattt | gttttggggc | acattcaaag | ctgtcctggc | cacatgaggc |
| 164281 | ctgagggcta | taggttggac | aagcttctag | ctggctattt | ctgcattttg | tccaaatcca |
| 164341 | tcttttaatt | attatcatta | ttattattat | tatttgagac | ggagtctcgc | tctgtcaccc |
| 164401 | aggctggagt | gcagtggcgc | gatctcagct | cactgcaagc | tctccctccc | gggttcacgc |
| 164461 | cattctcctg | cctcagcctc | ccgagtagct | gggactacag | gcgcctgcca | ccacgcccgg |
| 164521 | ctaattattt | tgtattttta | gtagagaagg | ggtttcaccg | tgttagccag | gatggtcttg |
| 164581 | gtctcctgac | ctcgtgatct | gcccacctcg | gcctcccaaa | gtgctgggat | tacaggtgtg |
| 164641 | agccaccgcg | tccagctgaa | acataatttt | tctctttttg | gtttcacatt | tttactaaag |
| 164701 | acaaatcatg | gtaagactga | tttgctttat | tatacttggc | ctgattattt | gtgtaacgtg |
| 164761 | cagcaagaat | acttactttt | cacataggct | ttttaagttg | gctttgatgg | aactttgttt |
| 164821 | tgtagaagaa | tctcagatta | gactttttct | tttaaggccg | ggctcagggg | ctcactcctg |
| 164881 | taatcccagc | actttgggag | gctgaggagg | gaagatcaca | tcaggagttc | aagaccagcc |
| 164941 | tggccaacat | ggtaaaaccc | cgtctctact | aaaaaacacc | aaaaactagc | caggcatggt |
| 165001 | ggcaggtgcc | tgtaatccca | gctacttggg | aggctgaggc | aggagaatca | cttgaacctt |
| 165061 | agaggcaaag | gttgcagtga | gccaagatca | caccattgca | ctccagcctg | ggcgacagag |
| 165121 | cgagactctg | tctcaaaaaa | acaaaacaaa | acaaaacaaa | actttttttt | taaagccgag |
| 165181 | tttggccatg | cggttgtacc | atcaaatacc | tatgagttgg | gtgaattcct | cttgagaacc |
| 165241 | caagatgatt | tggggctcct | gggtctgtca | gagagtgaca | ttctttactt | gccacaggtc |
| 165301 | agaaaccctg | ctcaggatct | gtgtagaaaa | ggtatgaagt | tagttttccc | aaggggctct |
| 165361 | tatcagctct | ataagtcaag | tttgattcct | taaaggaaag | cacaccattc | cagtcaaagc |
| 165421 | cttggtaaaa | taactggttt | ctccaattgt | gtcctgttac | aaaagaaaac | agattctggc |
| 165481 | tgggcacagt | ggtcatgcct | gtaatctcag | tactttggga | ggctgaggtg | ggcagatcac |
| 165541 | ttgaggtcag | gagattgaga | ccaacctggc | caacacggtg | aaaccccgtc | tctactaaaa |
| 165601 | atacaaaaat | tagctgcttg | tgttgtgtaa | ttgggtaata | agagatttta | aagaattttt |
| 165661 | tttgtagagc | accatggttt | aaagtcagct | taattaaaat | tagatattca | agctctaaca |
| 165721 | gcctgggact | ccttggggaa | aacaggaggc | gccagagaca | ccattttgga | aaaaaaccct |
| 165781 | gttttcctct | tggaacccca | ggaattgaaa | gctgataaat | tcctctcaaa | atttaaggct |
| 165841 | ttgttctgtt | ttggattgca | gtatctgaag | tttttgactt | ttggtctatc | agaaattata |
| 165901 | tcgcattatg | agagagtttt | ggtgtgtaat | aactaggtag | gaaatatact | ttaaggaatg |
| 165961 | gctaatggaa | attatagatg | atcacgtagc | tctttgcatg | tttggattag | agaagcatgc |
| 166021 | tcttggccac | ctggaaggta | tggaaatacc | tttttttttt | tttttttttt | ttttgagaca |
| 166081 | gagtctcact | ctgtcacccc | ggctggagtg | cagtggcaaa | atctcagctc | actgcaatct |
| 166141 | ctgcctcctg | ggttcaaagg | attctcctgc | ctcagcctcc | caagtagctg | ggattacagg |
| 166201 | cacctggcac | catgcccagc | taatttttgt | atttttagta | gagacggggt | ttcaccatgt |
| 166261 | tggccaggct | ggttttgaac | tcctgacctc | aggtgatctg | cctgcctcgg | cctcccaaag |
| 166321 | tgctgggatt | ataggtgtga | gccaccgtga | ctggctggaa | atatcttctt | atctcccact |
| 166381 | gagagataag | acttccacag | aagatgggct | gattccccct | tttttgggga | gggatccagg |
| 166441 | gtctggtata | aaatgggatc | ttcattttgg | gggatctgtt | ttgccttcca | gctgtgcctg |
| 166501 | cttattaggg | ccaaaggtac | ttgggagtcc | cagctatttg | ggagactcag | gcaggagaat |
| 166561 | cacttgaatc | caggagatag | aggttacagt | gagctgagat | cacaccactg | cattccagcc |
| 166621 | tgggtgacag | agttagactc | tgcctcaaaa | aaaaaaaaaa | aaaaaaaaaa | gaaagaaaga |
| 166681 | aaaaagagac | agattattta | gattatttat | ttacttactt | tttttttgag | atgcagtttt |
| 166741 | gctcttgtca | cccaggctgg | agtgcaatgg | cacgatctcg | gctcactgca | acctctgcct |
| 166801 | cccgggttca | agtgattctc | ctgcctcagc | ctcctgagta | gctgagatta | caggcacaca |
| 166861 | ccaccacacc | cagctaattt | ttatttattt | atttttagta | gagacagggt | tttgccatgt |
| 166921 | tggccaggct | ggtcttgaac | tcctgtcctc | aggtgatcca | cccacctcag | cctcccaaag |
| 166981 | tgttgggatt | acaggcgtga | gccactgcgc | ccggccaaga | aacagattct | tattgcactt |
| 167041 | atgcaaataa | ctatattgct | ataagttaag | aatactcaca | cctagtttcc | taattctgga |
| 167101 | aaaatcaggt | agaaaaaaac | aaatatgctc | caaatatgtt | gccagaagta | tactttactg |
| 167161 | aattgttttt | tttttttttt | ttgagacgga | gtctcgctct | gtcgcccagg | ccggactgcg |
| 167221 | gactgcagtg | gcgcaatctc | ggctcactgc | aagctccgct | tcccgggttc | acgccattct |
| 167281 | cctgcctcag | cctcccgagt | agctgggact | acaggcgccc | gccaccgctc | ccggctaatt |
| 167341 | ttttgtattt | ttagtagaga | cggggtttca | ccttgttagc | caggatggtc | tcgatctcct |
| 167401 | gacctcatga | tccacccgcc | tcggcctccc | aaagtgctgg | gattacaggc | gtgagccacc |
| 167461 | gcgcccggcc | tactgaattg | ttaaaaggtg | taaatagctc | aaaatttttc | ctgactctga |
| 167521 | aaacaaaaca | aagtttcagc | agcattttaa | gcaaagtcaa | aaacatttct | tcagtcttct |
| 167581 | atttgttcat | tccatgcagt | taactcctgt | cctgtttaat | cgtcatgaac | atttcagctg |
| 167641 | tccatgagtc | ctgaaagttt | ttcctctatt | ctgacgtcac | aatctccaaa | cttatcagaa |
| 167701 | acctgcattc | aagagaacct | gtcaaaatcc | tatagttgat | tataaaccac | cttttgaaga |
| 167761 | ggatcaaaat | aagaaaacaa | ttgtctgtgg | ttgacagaag | tcttaggaca | gccactattt |
| 167821 | aagccacaat | tgaaaaggaa | atgtgggggt | gggcacggtg | gctcacgcct | gtaatcccag |
| 167881 | cactttggga | ggccgaggca | ggcagatcac | ctgaggtcag | ggatttgata | ccaacctggc |
| 167941 | caacatggtg | aaaatccgtc | tctactaaaa | atacaaaaat | tagctgggga | tggtggtggg |
| 168001 | tgcctgcaat | cccagctact | gagagtctga | ggcaggagaa | tcgcttgaac | ctgggaggtg |
| 168061 | gagttttcag | tgagctgaaa | ttgtgccact | gtactacagc | ctgggtgaca | gagtgagact |
| 168121 | ctgtctcaaa | aaataaaaaa | gaaaagaaaa | ggaaattttg | gttagttctg | tgacaacaat |
| 168181 | tttacataac | aattatgact | attaataaca | tacactaagt | tatcaaggaa | ttatgggtgt |
| 168241 | tttccataat | tttggaacat | gtccaataac | atatttatgc | aaatataggc | caaagaaagc |
| 168301 | caaatactat | ttcacatttg | acgatgcttc | ctttatggat | tttatactga | ataagccaaa |
| 168361 | tttcaccttt | acgttagtgt | actattaatg | ttaaacccaa | ttctttaata | aaacctttta |
| 168421 | gacaaattta | tttaatctta | atcagtttga | ccataaagta | agattcttat | aaacttttgt |
| 168481 | ttcctcacct | ccccagaaaa | gtggatccta | aaccttttat | aaccctttac | aatttttgtg |
| 168541 | aacgagcaga | ttaatgctct | aagaaaaacc | tgttgtgctt | ttattccaat | gtttgattta |
| 168601 | tagaaaaaat | gaatacccct | ttaactttag | ccaacatgtt | cacacagaat | ttcttttatg |
| 168661 | acattaattt | ttcacaaacc | tcccacaatt | tgttcaagcc | ttcagcttta | tctcatctaa |
| 168721 | aacaatcctt | taacccttta | atctaggcag | aaaaatccac | attcccatga | cttcttataa |
| 168781 | tcttttacca | aaaacacatt | tcactttcct | tacacacctt | gcatgtaaaa | ctgatgttat |
| 168841 | ttcccaaaga | ttactaaagg | catataaact | aaaaggcatc | acagttttta | tttttctaat |
| 168901 | aaaatatttg | atttaagctc | ttattatttt | ttaacctatt | aatcaaagct | cttttatatc |
| 168961 | tcacacacac | aacatatata | aatacacaga | ccagaagatc | cagtagttgt | aagaattttc |
| 169021 | atttgccagt | ttctttttct | ttcttttttt | ttgaatcgga | gtcttgctct | gtcgcccagg |
| 169081 | ctggagtgag | gtggcttgat | ctcggctcac | tgcaagctcc | gcctcccagg | ttcacgccat |
| 169141 | tctcctggct | cagcctcctg | agcagctggg | actacaggct | tctgccacca | cgcctggcta |
| 169201 | agtttttgta | cttttagtgg | agacggggtt | tcactgtgtt | agccaggatg | gtctcgatct |
| 169261 | cctgacttcg | ttatccacct | gcctcggcct | cccaaaatgc | tgggattaca | ggtgtgagcc |
| 169321 | accgcgcccg | gccatcattt | gccagtttct | taattggatt | actgacttta | gggtggagcc |
| 169381 | cttgggggaa | caaggtcagg | aaagcatgca | gtttctacag | cctaataagc | aggcaagctg |
| 169441 | gaaggcaaga | cagatccccc | aaaataaggg | tcccatttta | taccagatcc | tggatccccc |
| 169501 | ccaccaaaaa | aggggaaatc | agcccatctt | ccgtggaagt | cttatctctc | agtgggagat |
| 169561 | aagcgggtat | ttccatacct | tcgaagtggc | caagagcatg | cttctctaat | ctaaatatgc |
| 169621 | aaagagttaa | gtattcacca | ataacttcca | ctggccattc | cttaaagtat | atttcctacc |
| 169681 | tagttactac | acaccaaagc | tctgtcataa | tacgatgtaa | tttctgatac | caccaaaagt |
| 169741 | caaaaacatc | agatactgca | atgcaaaaca | gaacagagcc | ttacattttg | agaggaattt |
| 169801 | gtcaactttc | aactcctggg | gtttcaagag | gaaaacagag | tggtattttt | tttttttttc |
| 169861 | caaaatggtg | tctctggcac | ctcctgtttt | tcccagggag | tcataggctg | ttagagtttg |
| 169921 | aatatcctgc | tttaatgaag | ctgactttta | accatagcac | tcttaaaaat | aaaaatcctt |
| 169981 | taatgtctct | tattacccaa | cttcagccat | gccaaactac | caatatttct | ggcttctgaa |
| 170041 | ctttaccaaa | ggcaaactcc | caggtactcg | gagaaaaaaa | attcaagaca | gtttgtggag |
| 170101 | ggaaagagaa | tctacaaatg | ttcagacaga | tctcaaacta | gaaaggactc | attccctaag |
| 170161 | ctggggattg | aaccctgaac | ctgggctgcc | actgtgaaaa | gacagtctta | gctgctgagc |
| 170221 | tacagcattg | ggcagtctcc | attgcccttc | ccagaaggag | gctagagtca | ccaattttga |
| 170281 | gcttgcaaag | gcttttatct | gatcaagata | atttttagga | gtaactatgg | catgaacccc |
| 170341 | aaaactcctg | tctgctggat | ggtagaaacg | aagagaaagt | atcgccacgt | ggttacaagg |
| 170401 | tgaagctccc | aaggacataa | aacaagacga | aagagaaatt | tcatccagct | tttcagggac |
| 170461 | cttcagcaaa | gtttataact | gatcagtttg | cttggccatt | ttgaacagcg | ggcttacagg |
| 170521 | cgtcatagtg | agagacagga | ctagctggat | atcctaggcc | tactaagaat | ccctaagcct |
| 170581 | agctgggaag | gtgactgcat | ccacctttaa | acacggggct | tgcaacttag | ctcacacccg |
| 170641 | accaatcagg | tagtaaagag | agctcactaa | aacgctaatt | aggcaaaaac | aggaggtaaa |
| 170701 | gaaatagcca | atcatctatc | gcctgagagc | acactgggag | ggacaatgat | aggatataaa |
| 170761 | cccaggcatt | caaaccagca | agggctaccc | tctttgagtc | ccctcccttt | gtatgggagc |
| 170821 | tctgttttca | ctctattaaa | tcttgcaact | gcacactctt | ctggtcagtg | tttgttacga |
| 170881 | ctcgagctga | gctttcactt | gccgtccacc | actgctgttt | gccgccatcg | cagacccgcc |
| 170941 | gctgacttcc | acccctccag | atctggcagg | gtgtctgctg | tgctcctgat | ccagtgaggc |
| 171001 | acccattgcc | gctctggatt | gggctaaagt | cttgtcattg | ttcctgcacg | gctaagtgcc |
| 171061 | cgggttcatt | ctaatcgagc | tgaacattag | tcgctgggtt | ccacagttct | cttctgtgac |
| 171121 | ccacggcttc | taatagagct | ataacagtca | ctgcatggcc | caagattcca | ttccttggaa |
| 171181 | tctgtgaggc | caagaacccc | aggtcagaga | acaagaggct | tgccgccatc | ttggaagcgg |
| 171241 | cctgccacta | tcttgggaac | tctgggagca | aggaccccct | ggtaacagta | ggcttgcatt |
| 171301 | ctatcctaag | gtacccttct | ttatggcaga | acaatataga | cacacaaagc | acaccagatt |
| 171361 | cgttacagct | taaggctagc | ctcacaagtc | ttttttctca | ttaaccaaaa | cttgcctgtg |
| 171421 | gtaaggtggg | gaaagtgaag | agctcaggaa | gaccagagaa | agactcacct | atcccagtga |
| 171481 | cactgaatca | aaagttcagg | cagccgctca | ttggttaaga | agggatcttt | tccaggagtt |
| 171541 | gcatcagctc | ttaagtgtcc | ccgtttgggg | agcaaaaagc | tctcatgtcc | caggatcctg |
| 171601 | tacatacaca | attctgtcac | ccacagccat | cagcaaagat | ttcaaggtag | attaatccaa |
| 171661 | agagaatagc | aattaatatc | ccatggtgct | aaatccgttc | ttagccaaga | ggaactttac |
| 171721 | tctgagaggg | gcttctaact | ccctaaatct | tagaagggac | tctaacactc | ctgagttggg |
| 171781 | cctcaaacca | aagttcagtc | aagtgtcctt | gccttttatt | aagaggggcc | tttaacccac |
| 171841 | tctgtcttag | gagagacttt | aactccccta | agttgagcct | ctaacccaat | tccatccttt |
| 171901 | acctgggtac | cccgccactt | accctagata | gccaattggt | gctgcagtct | atttcctttg |
| 171961 | ggtagggtgt | ctcctcaggg | ttcgacagga | agatgttacc | agaaagggat | ccagatccag |
| 172021 | accccaagag | aaggttcttg | gatcttgtat | aagaaagaat | ttggggtgag | tccatagagt |
| 172081 | aaagtgaaag | caagcttatt | aaggaggtaa | aggaatacag | aatggctact | ccataggcag |
| 172141 | ggcagtggct | tgagctgctc | cactaaggat | acttattgtt | acttcttgat | tatatgctaa |
| 172201 | agaaggggtg | gattattaat | gagttttcca | aggaaggggt | ggccaattcc | cgtaactgag |
| 172261 | ggttcctctc | ctttttagac | catttagggt | aacttcctga | tgttgccatg | gcatctgtaa |
| 172321 | tcacggcact | ggtgggagtg | tcttttagca | tgctaataca | ttataattag | catataatga |
| 172381 | gtgatgagga | tgaccagagg | tcactttggt | cgccatcttg | gttttggtgg | gtttgggctg |
| 172441 | gcttctttac | cacaggctgt | tttatcagca | aggtctttgt | gacctgttat | cttgtgctca |
| 172501 | cctcctagct | catcctgtca | cttggaatgc | cacacctcct | gggaatgcag | cccagtaggc |
| 172561 | ttcagcttca | ttttacccag | cccctattca | agatggggtt | gctttggttg | aaacgcctct |
| 172621 | gacagaccca | ccagaggagc | ccttcagttt | gtattaatat | gatatgtgac | tacttatttc |
| 172681 | acagacactg | tgtgtcaaat | gtcggtacaa | tgccaacaac | tcactttctt | ggttgttgag |
| 172741 | tttccgcatt | acacaaataa | ggaagcaggc | ccagaggaga | gcctgggaaa | tgaagttgga |
| 172801 | gagacccatc | ctggggttgc | ttgatttagg | gatttagact | gggaatgact | cctccataga |
| 172861 | tctgaaagaa | gaaactgcac | actgttcata | gtggcttctt | ttctgccagc | cctaaacagc |
| 172921 | tcaagaaagg | agagtctctc | agttatgagg | ctgggtgtga | agcatttttt | ttttctttga |
| 172981 | gagaggtctt | gttatgttgc | ccaggctggt | ctccaaatcc | tgggctcaag | cgatccttcc |
| 173041 | accttggcct | cccaaagtgc | tgggattaca | aatgtgagcc | accacatccg | gcctgaagca |
| 173101 | tcttggttca | tgcatctagc | aaaccttcag | tctgtgtctc | tcaatcccac | tggacatgag |
| 173161 | gtctgcctat | aacaattatt | tggctacaac | ccctttaata | tcctgaactt | agctaaacag |
| 173221 | ttattttaaa | aatccatatt | caaatataac | taaagaagaa | acagaggaaa | agtaatttgt |
| 173281 | aatatggatt | tctatttata | ttcgttttga | ctccattagc | agatagcagt | cactgccctg |
| 173341 | tttgcacttg | ttttgaatca | gtgagcctgt | agctgccaag | tgcagactaa | caagaggtaa |
| 173401 | ataacctgta | taccttgagc | agctctgact | ttaacttatt | cttttatttt | ttatattttt |
| 173461 | attttttttt | atttttatct | ctttttagac | atgaggtctc | actatgttgt | cccagttgac |
| 173521 | ctcaaactcc | tgcactcaag | tgatcctccc | accttggcct | ccaaagtact | gggattatag |
| 173581 | gtgtaaacca | ctgtgcctgg | gcttttatat | attttttaag | tgcacatttt | aatgtttagc |
| 173641 | ttgtcagcct | taagtaacga | gatccagaaa | gcttgaggat | agctacacag | aagcatagat |
| 173701 | tcaagttgtc | ctgaatatac | acttcgattc | acagcagtta | caagtgagtt | tttaaggaaa |
| 173761 | cagaatagtt | cctaagttgt | ttatcaagaa | tttaaaataa | aataacataa | gcaattcatt |
| 173821 | ggctatacat | tgttttttgt | atcacaaatt | ccaggaacag | ataacgggtg | aggcagctag |
| 173881 | tcagggacaa | aacgccttgg | aacaattgtc | tctgggcatg | ggtggggagg | gtgtgactga |
| 173941 | agttccatac | tcatgccttt | ctgggcctga | taaattgggc | atgtctcaca | tcatgagact |
| 174001 | gctctgagct | atttttcttt | tctcaagctt | tataccaaat | tctaggccgt | gggctttcat |
| 174061 | tcattcaata | agtatgtatt | gagtgtttat | gtaatcggaa | ctcttctggg | gttacaattt |
| 174121 | aacttacttt | ctcacctccg | aatggttatc | acctcaacga | ggactaaatc | caatgatttt |
| 174181 | tttttatctt | gccaaaattc | ctatctaagg | ggtctgggga | gtcatgccct | acaaatcata |
| 174241 | aattctcatc | agatgggttt | tatttaaccc | tatatatcat | gacttacttt | ccaacctgac |
| 174301 | tctggcataa | catgacgaga | caaggaagaa | aagcaaaata | ttttaatatt | tttacctcaa |
| 174361 | aacatgtttc | tttgccatat | cttgaaatgg | ccctgctact | gtcctttgtg | ggggaaaatt |
| 174421 | ttcatctgta | aagaatctct | attaacatag | ctggatcttt | ttctaccagg | cccttccaat |
| 174481 | cataaagaga | ttaactaagt | gtagcacctt | ttatagatct | gaataggaaa | cacttgtcat |
| 174541 | ctgttgtttc | taagggcagc | cactataaga | cttcaaaaga | accttggtct | ccacagtctt |
| 174601 | ttatcttaac | atttcttttc | tatcaacccc | aggtctttag | acaaactcaa | ccaattgtca |
| 174661 | accataaaat | gtttaaattt | acgtatagcc | tgaaagccct | gccaccccac | tttgaattgt |
| 174721 | cccaccttcc | tggaccaaac | caatgatttt | tttttttttt | tttagatgga | gtctccctct |
| 174781 | gccgcccgtg | ctggagtgca | gtggtgtgat | ctcggctcgc | tgcaacctcc | gcctcctggg |
| 174841 | ttgaagcaat | tctcctacct | cagcctcctg | agtagctagg | attacaggtg | cctgtcacca |
| 174901 | cgtccagcta | attttttgta | tttttagtag | agacagggtt | tcactatgtt | ggccaggctg |
| 174961 | gtctcaaact | cctgacctca | agatcagcct | gccttggcct | cccaaagtgc | tgggattaca |
| 175021 | ggcgtgagcc | accgtgcctg | gccaatgtat | tccttaaatg | catttgattg | atgtctcatg |
| 175081 | cttccctaaa | atgtatgaga | catccttctc | ccctgattgt | tttcaaaagc | agtgatccat |
| 175141 | tgaggtgctc | atttttgtaa | ccccagttac | tagaaaagtg | cctgggtaag | agtatgtagg |
| 175201 | atctctataa | aagctgaatt | aacgaatttt | gtaatgactg | cacctccaga | caggagctgt |
| 175261 | cttccgggct | tccacagtct | ctgacagccc | tctcccacaa | agagtttacc | aacagcaagg |
| 175321 | actttcctgg | atgacttcca | ctgggttggg | gattaaggat | tgaaagggga | gaggctgggt |
| 175381 | gtggaatatt | ctggctgtgc | tggctgtgga | cttagtcctg | tgtcttcccg | catccagtgt |
| 175441 | agtctctgga | gaaagaatgc | ctgagcttta | ccagcaccac | ccaggaagcc | cataagaata |
| 175501 | ttcccatcta | tatggattca | actggaacca | ctgtggagag | atggtacctg | cctgcaaacg |
| 175561 | gcactttatc | caggacacct | gcctttacga | gtgacccccc | aacttggggc | cctggatcca |
| 175621 | gcaggtacgc | atggcttcct | ggcatccaag | agctagcaga | ggagctgaat | tttccaggcg |
| 175681 | tctctgcagg | cagcaacccc | agctccagtt | ctattcaggg | ctgggttcct | gggattcttg |
| 175741 | agcctgagcc | cttcttttct | accaaaatct | cccaggtgga | tcagagctgg | cgcaaagagt |
| 175801 | gggtgctgaa | tgtgcccctg | tgcaaagagg | actgtgagca | atggtgggaa | gattgtcgca |
| 175861 | cctcctacac | ctgcaagagc | aatgggcaca | agggctggaa | ctggacctca | ggtgagggct |
| 175921 | ggggtgggca | ggaaaggagg | gatttggaag | tgaaggtgtg | tgggtgtgga | acaggtgtgt |
| 175981 | gacattttgg | ggttgtaggg | ctggcagaat | cagagaccct | ttggggccca | gtggctaaag |
| 176041 | gtcttccctc | ttccctacag | ggtctaacaa | gtgccaggtg | gcagctgcct | gactaccttt |
| 176101 | ccatctctac | tttctcacac | ccactgctct | gtgcagtgaa | atctggactc | actcctacag |
| 176161 | ggtcagcaac | tacaaccgag | ggagcagccg | ctgcatccag | atgtggttcg | acctggccca |
| 176221 | gggcaacccc | aatgaggagg | tggcaaggtt | ctatgctgca | gctctgagtg | gggctgggcc |
| 176281 | ctgggcagcc | tggcctctcc | tgctcaacct | ggccctaatg | ctgctgtggc | tgctcagctg |
| 176341 | acctcctttt | accttctgat | acttggacat | ccctgccctg | tttagcccca | cagctcccaa |
| 176401 | ctatttggtt | cctcttctat | ggtcttgtct | ctgacagcca | ctttgaataa | accagacacc |
| 176461 | acacatgtat | cttgagaatt | atttgggtat | gaatgggaat | gtggctgttt | tgtttcccat |
| 176521 | ttcttattga | ttgaagccag | ttagactggg | ctagttccca | gctctgatgc | ttgctatgaa |
| 176581 | ctagcctgat | acttaagtat | tcttctaagg | taggagacat | ttgtagctct | cgattttatt |
| 176641 | attcactata | gctccaattt | agagccaagc | ccaggcattt | ttcttttttt | gagacagggt |
| 176701 | ctcactctct | cacccaggtt | ggaatggagt | ggcatgatct | cagctcactg | caacgtctgc |
| 176761 | ctcgtgggct | caagtgatcc | tcccacctca | gcatcccaaa | tacttgggac | tacaagcatg |
| 176821 | tgccaccaca | cctggctaat | ttttcaattt | tttgtagaga | ggaaatcttg | caatgttgtc |
| 176881 | caggctggtc | tcaaactact | gggctcaagc | aatcctccta | cctcagcctc | ctgagtagct |
| 176941 | gggtctacag | gtgtgagcct | ccacattcag | ctaatacata | taatataaaa | catgtattat |
| 177001 | atatgtaata | gtagagacag | ggtctcacta | ttttacccag | gttgttctca | aactcctgcg |
| 177061 | ctggagtgat | cctcccaaaa | tgctgggatt | acaggcatga | gtcactgcat | ctggccacaa |
| 177121 | gtcatgttta | tttcttgctc | aagctacaat | gctgaatgtg | ggttatcagg | gggattctgt |
| 177181 | ttatttctca | ttcctggact | acattagcag | ccagggggtt | ctgcttctca | ctcaagaacc |
| 177241 | cacgctgatg | gaggctccat | cttccatgag | acaggaagag | ggaacttggc | aaattccata |
| 177301 | aggctcttca | aatttccacc | catcacttat | ttcattggcc | aaatcaagtc | atgagcatgc |
| 177361 | ctaaattcaa | gaaagccagg | aaaacataat | cctatcatgt | acttgcaagg | agaggggaat |
| 177421 | cacaaggttt | gcaacagacc | taatcatgag | taaaaagact | tcattatttt | ctcgtagatt |
| 177481 | tctgtttctg | gcatggtcat | agttacaaat | ttaatttttt | ggttagatcc | tagtaagaag |
| 177541 | gaggaccaac | tctctataca | tatgcaaata | actacatcaa | cctgaaaagt | ggagcaatcc |
| 177601 | actgatgacc | gccctggcta | gtcttgtaaa | caaggccaat | tgatgccttt | tcgcccttca |
| 177661 | tttatttcta | tttattattt | ttattttttg | agacagggtc | tctttctgtt | gctcaggctg |
| 177721 | gagtgcagtg | gcacagtcat | ggctcactgc | agtcttgacc | tcctgagctc | aattgatccc |
| 177781 | tcaactttag | cctcccaagt | agctgggact | acaggcacat | gccaccatgc | tgggcaaatg |
| 177841 | ttttgtattt | tttttgtaga | gatggggttt | tgccatgttg | cccaagctgg | tcttgaactg |
| 177901 | ctgcgcccaa | gtgattcatt | cacccacctt | gacctcctaa | agtgctggga | ttagaggcgt |
| 177961 | gagacacctc | tgccagccca | ctgatttctt | ttttgaaccg | aaagcatagt | tgatcaatgc |
| 178021 | aaaagctaat | aattggatat | taacaaaatt | caaaactctt | gcactttaaa | agacaccctt |
| 178081 | aagaaaatta | aaaaacaagc | aacagactgg | aaggaaatat | ttgcaaacac | atctgataaa |
| 178141 | ggatctgtat | ccataaaata | caaagaacac | ttacaactca | gtaacaagaa | ggcagacaac |
| 178201 | ccaatcaaat | aatgggcaaa | agaaatgaac | aaatatgtca | ttaaagaagg | tacacaaatt |
| 178261 | atgaatagtt | acacgaaaag | atgctcaaca | ttattaatca | ttagaaaaat | ggaaactaaa |
| 178321 | accatagtga | tagacggttt | tatacctact | agaatggcaa | taataataat | gataggcaat |
| 178381 | aacaagcatt | ggcaaggatg | tggagaaatg | ggaaccctca | cacagtgctg | gtggggatgt |
| 178441 | aaaatggtac | agcccttcgg | aaaacagtgt | ggcagtttct | caaaaagtta | aatgtaaaac |
| 178501 | tgccatacaa | cccaaaattc | cactcccagg | tgtctactca | ggagaaacga | aaacaaacat |
| 178561 | aacaaaactt | aaatatgaat | attaataata | atcatattta | tgtatgtaaa | tatgatgtat |
| 178621 | catttatgta | tgtaaatatg | atatatcata | ttatgtatca | ttatatataa | tagccccaag |
| 178681 | ctggcaataa | cctaaatttt | tagcagctgg | tgagtagata | gacaaaatgt | ggtgaatcca |
| 178741 | tacaatagaa | gactgtgcag | caatgaaacg | tgatgacaca | tgctatgtcg | tggatgagcg |
| 178801 | tcaaaaacat | tatgttaagt | gaaagaagcc | agacctaaga | ggcttcatgt | ggcatgattt |
| 178861 | cacttacatg | aaatgtgcag | ggaaggcaaa | tttatagagg | cagaaagtag | attagtagtt |
| 178921 | gcctggggct | ggaagtgaca | acagggatta | attgtaaatg | ggcatgaggg | gggataagaa |
| 178981 | ttgaggggat | gattctgagt | ttctgtgggg | tgtatccatg | agggaaagta | ttctaaggaa |
| 179041 | attggcatgt | ggctccataa | aaatctatca | tctgagacaa | actccattcc | catcatgaac |
| 179101 | tttaaaatat | tggttggaag | ccaagcatgg | tggctcatac | ctgtaattcc | agcactttgg |
| 179161 | gaggccaagg | caggtagatc | acttgagcca | gggattctag | aacagcttgg | gcaacatggt |
| 179221 | gaaaccccgt | ctctacataa | aaatacaaaa | aatttagccc | agtgtggtgg | tccacgcctg |
| 179281 | tagtcctagc | tatgcaggaa | gctgagatgg | gaggatctct | ttagctcagg | aggtagaggc |
| 179341 | tgcagtgggc | tatgactgtg | ccactgcagt | ccagcctggg | ttgatagagt | gagaccctgt |
| 179401 | ctcaaaaaaa | aaaaaaaaaa | aaaataggaa | ttgctggatg | gtaatgttgt | aggagtttct |
| 179461 | cctcagttca | gccaaagaca | gggtccttgt | cacctggcca | tgaaatatta | ggcttgcaga |
| 179521 | cactttgaag | ggtgagaaaa | atggaattta | ttgggcaaaa | aaaaaaagcg | gggaaacggg |
| 179581 | gaccctcggc | agagtgagag | tcctgctagt | acacgcttcc | cacctctcag | gttgaatccc |
| 179641 | aggttccacc | ctggaagagg | aggggccagg | ctcctcagca | cgaacttcca | gaggctccac |
| 179701 | cccagtgcac | attcctccca | gtgtgcgggt | ttgtcagagg | ttctctgggg | acccctttac |
| 179761 | acttggctgt | ctcattcccc | cctctcaaga | agtacatcaa | actactgtta | gaacaaggat |
| 179821 | aggggtgagg | acgaagaccg | atctaaactg | cttcctgcta | acagggagcg | gtgttttggg |
| 179881 | aaacggcagt | cagagctccc | tcagaagcct | atctaagggt | tcccggcaga | aggcgccatc |
| 179941 | ttccgaggct | ccggttgcac | gaccatttgg | agtttgatgg | cctgaaggca | agaggagaaa |
| 180001 | aaccaggtta | ttagaaaaca | tgtgttaaaa | cgaaacaagg | gagggtaagg | acagcttaaa |
| 180061 | atccctaggc | cttttaccag | tttgcacagg | gagagggaaa | ccaaaagccc | gactggtaaa |
| 180121 | aaaaacttta | cccttttgcc | agcatgtcat | gcttgtgggt | tcccttcctc | tgagcccaat |
| 180181 | cctaagccaa | ccagctgaag | gtttgggaaa | ttaactcttt | ccagtttgga | ggatgcatct |
| 180241 | gaggggagtg | tcctatagta | caaagacaca | attacctatt | agtgaagaga | agacagtgga |
| 180301 | gaagaaagga | aaaaaaggtg | ctttttaaag | gagtcccagg | ggttcagcat | gcattcaaaa |
| 180361 | ggggtacaga | gtgaagatga | atggctaccc | atctagaaag | aggggagcag | gcatccctgt |
| 180421 | ctcctatctc | tttctagcag | ataccagggg | tacatgaggg | agagaaggaa | gagcgtcctc |
| 180481 | tttccctctt | ctgtccttgc | atacccaagt | cctggtgacc | ttggcaggtg | ctgccatggg |
| 180541 | tgccacagca | gcttgcaccc | atgaagcagg | gagtacctag | agaataggaa | ttatcagcca |
| 180601 | gactcagtgg | ctcacgcctg | tacaacccag | caccttggga | ggccgaggtg | ggcagatcat |
| 180661 | gatttcagga | gtttgagacc | agcctggcca | acatggtgaa | accccgtctc | tactaaaaat |
| 180721 | acaaaactta | gctgggtgtg | gtggtgcatg | cctgtagtcc | cagctactcg | ggaggctgag |
| 180781 | gcaggagaat | cacttggtcc | caggaggcaa | aggttgcagt | gagccaagat | cacaccactg |
| 180841 | cactccagcc | tgggcaacag | agtaagactc | catctcgggg | aaaaaaaaag | agagaatagg |
| 180901 | aattatccgc | tcttacctat | gtttctatac | cccctacagt | cagtagtctt | ggagtttcct |
| 180961 | agacctcatt | tatgctgtgg | ggaaaagcaa | gagagatcag | attgttactc | tgtctgtgta |
| 181021 | gaaagaagta | gacataggag | actccatttt | gttatgtact | aagaaaaatt | cttctgcctt |
| 181081 | gagattctgt | taatctataa | ccttaccccc | aaccctgtgc | tctctgaaac | atgtgctgtg |
| 181141 | tcaactcaga | gttgaatgga | ttaagggcgg | tgcaagatgt | gctttgttaa | acagatgctt |
| 181201 | gagggcagca | tgctccttaa | gagtcatcac | cactccctaa | tctcaagtac | ccagggacac |
| 181261 | aaaaactgcg | gaaggccgca | gggacctctg | cctaggaaaa | ccagatattg | tccaaggttt |
| 181321 | ctccccatgt | gatagtctga | aatatggcct | cgtgggaagg | gaaagacctg | accgtccccc |
| 181381 | agcccgacac | ccgtaaaggg | tctgtgctga | ggaggattag | taaaagagga | aggaatgcct |
| 181441 | cttgcagttg | agacaagagg | aaggcatctg | tctcctgcct | gtccctgggc | aatggaatgt |
| 181501 | ctcggtataa | aacccgattg | tatgctccat | ctactgagat | agggaaaaac | cgccttaggg |
| 181561 | ctggaggtgg | gacctgcggg | cagcaatact | gctttgtaaa | gcattgagat | gtttatgtgt |
| 181621 | atgcatatct | aaaagcacag | cacttaatcc | tttacattgt | ctatgatgca | aagacctttg |
| 181681 | ttcacgtgtt | tgtctgctga | ccctctcccc | acaattgtct | tgtgaccctg | acacatcccc |
| 181741 | ctctttgaga | aacacccaca | gatgatcaat | aaatactaag | ggaactcaga | ggctggcggg |
| 181801 | atcctccata | tgctgaacgc | tggttcccag | ggtcccctta | tttctttctc | tatactttgt |
| 181861 | ctctgtgtct | ttttcttttc | caaatctctc | gtcccacctt | acgagaaaca | cccacaggtg |
| 181921 | tgtaggggca | acccacccct | acatatgcca | tggatactag | catgaccttt | atccatgaaa |
| 181981 | tgggaggctt | ggcttgattg | gcaggaatta | gccatgctca | cttgcacgca | ctgtgccttt |
| 182041 | tttttttttt | tttttttttt | tttttttgag | acagagtctc | gctctgttgc | caggctgaag |
| 182101 | tgcagtggag | tgaactcggc | tcactgcaac | ctccgactcc | ctggttcaag | tgattctcct |
| 182161 | gcctcagcct | cctgagtagc | tgggattaca | ggcacgcacc | accatgccca | gctaattttt |
| 182221 | gtattttttt | tttcgagatg | gagtcttgct | ctgtcgccca | gtctggagtg | cagtggcatg |
| 182281 | atctcagctc | actgcaacct | ccacctccca | gttcaagcga | ttctcctgcc | tctacctccc |
| 182341 | aagtagctag | gattacaggt | gcatgccacc | atgcctggct | aatttttgta | tatttagtag |
| 182401 | agacggggtt | tcaccgtgtt | tgccaggatg | gtcccgatct | cctgacctca | tgatctgccc |
| 182461 | gccttggcct | cccaaagtgc | tgggattaca | ggtgtgagcc | actgtgcccg | gccttgcact |
| 182521 | gtgcctttta | acccctgtta | tcatctgcct | ctgaatccct | tagatccagt | tttctttcct |
| 182581 | ggggctttga | ctcaaagctt | ggaatagaat | ttgaaacaaa | aatatgtgtc | taggaagggc |
| 182641 | tgcatggact | ccttatcata | agccaaatgc | taaggaaggt | gaagctgcag | aattgagtcc |
| 182701 | tcctccaaca | agggagagaa | aaagatgtct | tgtgacatgc | ccagataatt | ggtggctata |
| 182761 | gttatgtaag | ctaggatttg | ggtgcatggt | gcttggcttt | ggttagctct | tactttccaa |
| 182821 | aaaaggaaac | ctccgattaa | tgggcatcct | atttattccc | atcacctggc | aggatttgca |
| 182881 | ggataattgc | tcagaactaa | aatattgatc | cagattttta | cattacccat | cctctccttc |
| 182941 | tttctgagct | gcagctggag | attgctggtt | ggttcacagg | aacaaggagt | gttagcctaa |
| 183001 | aaatgtaggc | aaaaacttaa | acactaatga | ctttagaatt | tattgacaaa | tgtatggtgt |
| 183061 | tttgaaacat | aatttctctc | tctccagtcc | tcatttttgt | taaaaaagca | aattatggta |
| 183121 | ggattgagtt | gtttgcaaaa | tagactttag | tcatatactt | ggcctgatta | tttgcataaa |
| 183181 | gtgcagcaag | aataactatt | tctacataag | tcttttagat | tggctttgat | ggaactctgt |
| 183241 | tcttcaagga | atttcagaca | aaacgtttta | aaactgagcc | cagccatgga | tttgtatcct |
| 183301 | caaatacctg | taagttggat | gatcttctcg | tgttaaggtc | ccatgacaaa | tttggagctc |
| 183361 | ctagacctgt | tagaaagtga | cattcttggc | caggcgtggt | ggctcacacc | tgtaatccta |
| 183421 | gcaccttggg | aggccgaggt | gggcggatca | ccggaggtca | ggagttcgag | accagcctgg |
| 183481 | ccaacatggt | gaaaccctgt | ctctacttaa | aatacaaaaa | attagctggg | tgtggtggca |
| 183541 | agtgcctgta | gtcccagcta | tttgggaaac | tgaggcagga | gaatcacttg | aacctgggag |
| 183601 | gcggaggttg | cagtgagccg | agatcatgcc | actgcactcc | agcttggcga | cagagcaaga |
| 183661 | gtctgcctca | aaaaaaaaaa | aaaaagaata | ctcacggata | atttccaaat | tctggagaag |
| 183721 | ccaggcagag | agagagaaaa | atatgcttca | aattttgttc | acaggagtgt | agcttactct |
| 183781 | agtattaaag | gccttaaaga | gttcaaaata | attttccttg | actctgagaa | acaaaacaag |
| 183841 | gatcagcaat | attccaagca | aaagtcaaaa | aggttgcttc | agctttctga | gttcagtcca |
| 183901 | ttcagttctt | gttatgcttg | atattcgtga | acattttagc | tcttcatgag | tcctgtacat |
| 183961 | tttcctttat | tccaatatca | cagtctccaa | agttatcaga | aacctgtatt | tgagagcacc |
| 184021 | tgtcagagtc | ctatagctta | ttacaaacca | actttatttt | tttttgagac | aggatcttgc |
| 184081 | tctgttgccc | aagctggaat | gcagtggtga | gatcttggct | cactgcaacc | tccacctcct |
| 184141 | ggattcaagc | gattctcctg | ccccaacatc | ctgagtagct | gggattacag | gtatgtgcca |
| 184201 | ccatgcccgg | ctaatttttg | tatttttttt | tttttagtag | agatggggtt | ttaccatgtt |
| 184261 | gaccaggttg | gttttgaact | cctgacctca | ggtgataccc | ctgacttggc | cttccaaagt |
| 184321 | gctgggatta | aaggtgtgag | ccactgcacc | cagccggatc | aggcactttt | aacttgaaaa |
| 184381 | catgaagttc | tctttcctaa | cttttttctt | tctttctttt | tttttttttt | ttccgagaca |
| 184441 | ggatctcact | ctgtcaccca | ggctggagtg | cagggatgcc | atcacagctc | actgcagccc |
| 184501 | tgacctcctg | ggctcaagca | atcctcccag | ctcatcctcc | caaatggctg | ggactatagg |
| 184561 | cttagaccac | catacccaac | taatttttgt | atttttgtgt | gaagatgagg | tctccctatg |
| 184621 | tttcccaggc | tggtcttgat | ctcctgggct | caagcaatcc | atcagccttg | gcctcccaaa |
| 184681 | gcactgggat | tataggcatg | agccaccaag | gacggccccc | taatgttttt | tatattggct |
| 184741 | aatgagcttt | aagtttatac | atacaaggca | taaagaaata | actttaaagt | tatgttatta |
| 184801 | gatgtacagt | gatatgattt | agctctgtgt | ccccacccaa | gtctcatctt | gtagctccca |
| 184861 | taactcccat | gtgttgtgaa | agggacctgg | tgggagatga | ttgaatcgtg | gaggtgggtc |
| 184921 | tttcccgtgc | tgttctcatg | ataatgaatg | ggtctcacaa | gatctgatgg | ttttaaaaac |
| 184981 | gggagtttct | ctgcacaagc | tctctctttg | cctggtgcca | tccacataag | atgtgacttg |
| 185041 | cttctccttg | ccttccacca | tgattgtaag | gtctccccag | ccatgtggaa | ctgtaaatcc |
| 185101 | aataaacctc | tttcgtaaat | tgcccagtct | tgcatatgtc | tttatcagca | gcgtgaaaac |
| 185161 | agatgaatac | agtaaatttg | tactgggagt | ggggcattgc | tgaaaagata | cccaaaaatg |
| 185221 | tggaagcgac | tttggaactg | gggaacaggc | agaggttgga | acagtttgga | gcgctcagat |
| 185281 | gaagacagga | aaatgtggga | aagtctggag | cttcctagag | acttgttgaa | gggccttgac |
| 185341 | caaaagcctg | atagtgatat | ggacaataag | gtccaggctg | aggtggtctc | agatgaagat |
| 185401 | gaggaacttg | ttgggaactg | gagcaaaggt | aactcttgta | tgttttagca | aagagactgg |
| 185461 | cagcattttg | tccctgccct | agagatttgc | agaactttga | actcgagaga | gatggtttag |
| 185521 | gctatctggt | ggaagaaatt | tgtttattat | tattattatt | attattatta | ttattattat |
| 185581 | tttgagatag | agtctcactc | tgtcacccag | gccagaggac | agtagcgtga | ccttggctca |
| 185641 | ctgcaacctt | cgcctcctga | gttcaagcgt | ttctcatgtc | tcggcctccc | aagcagctga |
| 185701 | gataacaggc | atgtgcctcc | atgcctggct | aatttttgta | ttttagaaga | gacagggatt |
| 185761 | caccacattg | gccaggctgg | tctcaaactc | ctgacctcaa | atgatccaac | tcagcctcct |
| 185821 | gaagtgttgg | aattacaggc | atgagccacc | acacctggct | gcggaagaaa | tttctaagct |
| 185881 | gcaaagcatt | caagaggtga | cttgggtgtg | gttaaaggaa | ttcagtttta | taagggaagc |
| 185941 | agagaataaa | ggttcagaaa | atttgcagcc | tgacaatgcg | atagaaaaga | aaagccaatt |
| 186001 | ttctgaggag | aaattcaagc | cagctgcaga | aatgtgcata | agtaacaaga | ggaacattaa |
| 186061 | cccccaatac | aatggggaaa | atgtctccag | ggcatgtcag | aggtcttctt | ggcagcccct |
| 186121 | cccatcacag | gcccagaggc | ctaggagaaa | tggttccgtg | ggccaggtcc | agggtccccg |
| 186181 | tgctgtatgt | agcctaggga | cttggtgcct | tgtgtcccag | ctgctccagc | catggctgaa |
| 186241 | aggggccaac | atagagctta | ggccatggct | gcagagggtg | aaagccccag | tccttggcag |
| 186301 | cttccacgtg | gtattgagct | tgcaagtgca | cagaagtcaa | gaattggggt | ttgggaacct |
| 186361 | ccacctagat | ttcagaagat | gtatggaaat | gcctggatgc | ccaggcagaa | gtttgctgca |
| 186421 | ggggtggggt | gctcatggag | aacctctgct | agggcagggc | ggaagggaaa | tgtggggttg |
| 186481 | gagctcccac | acagagtcct | tactggggca | ctgcctaggg | cagctgtgag | aagagggcca |
| 186541 | ttgtcctcta | gccccaagaa | tggtagatcc | actgacagct | tgcactgttt | gcctggaaaa |
| 186601 | gctgcagaca | ctcaatgcca | gcctgtgaaa | gcagccggga | gggaggctgt | acactgaaaa |
| 186661 | gccacagggg | cggagctgcc | agagaccatg | ggaacccacc | tcttacatta | gtgtgacctg |
| 186721 | atatgagaga | tggagtcaaa | ggagatcatt | ttggagcttt | aagatttgac | tgccctgctg |
| 186781 | gattttggac | ttgcaggggc | ctgtagcccc | tctgttttgg | ctaatttctc | ccattttgga |
| 186841 | gtggctgtat | ttacccaata | cctgtactcc | cattgtatcc | aggaagtaac | taacttgctt |
| 186901 | ttgattttac | aggctgatag | gcagaagtgt | cttgcttttt | ctttgctgag | actttggact |
| 186961 | gtggactttt | gagttaattc | tgaaatgagt | tgagactttg | ggggactgtt | gggaaggcat |
| 187021 | gattggtttt | gaaatgtgaa | gatatgagat | ttgggagggg | acagggatgg | aatgatatgg |
| 187081 | cttggctgtg | tccccaccca | aatctcatct | tgtagctccc | ataattcact | catgttgtgg |
| 187141 | gagggacctg | gtgggagatg | attgaatcat | gggggtgggt | ctttcccatg | ttcttgtgag |
| 187201 | agtgaatggg | tctcacgaga | tctgatggtt | tttaaaacag | gagtttctct | gcacaagctc |
| 187261 | tctctttgcc | tgctgtcatc | cacataagat | gtgacttgct | cctccttgcc | ttctgccatt |
| 187321 | attgtgaggt | ctccccagcc | atgtggaact | gtaagtccaa | tgaacctctt | tcttttgtaa |
| 187381 | attgctctat | ctcgggtatg | tctttatcat | tcctgaaaat | ggactaatac | atacggcaat |
| 187441 | actcaagaga | gcaagtgtgg | atagcttggg | ttcatgaggt | ttttggtttt | tgtcaaaagc |
| 187501 | ataaatgtat | actgaaacta | cccagaaaaa | gcaaagtata | aaacagtatg | ctaccatttg |
| 187561 | tgcccataaa | tgggatatgt | gtagtgtaaa | tgcatagaat | ttgaccagat | gtatacccag |
| 187621 | agaccagaac | actcagtggc | ctcatgttca | tactttggca | aacacatgta | tagtatcctt |
| 187681 | aacttaaatg | taccattgtt | gtgtgcattc | tagtgttatt | gacatttaca | tatctattat |
| 187741 | caagtcagat | aaatcattct | gtgtctttgt | attttcactt | cctattttgt | atatttatgt |
| 187801 | atacatacac | acataccaat | acatatttaa | ataaggtata | acttcacctg | gtccaaaaat |
| 187861 | caaaacaacg | tagaaaggtt | tacagtgaaa | ggtcgcatcc | ctgatgctgt | cctcttcccc |
| 187921 | caggtgatca | ccttattggt | ttcttttcat | acctttcagc | attttctcct | gcaagcacag |
| 187981 | atattctaac | tcctcctttt | ttacacagaa | ttttttttta | catagcattc | ttctgcacct |
| 188041 | tccttctccc | acttcacaat | gcacatggag | atttttccgt | atttgtacat | caggagcttc |
| 188101 | ctctttcttt | gttaccacat | taaattccac | tgggtagatg | taccataatt | taactgggtc |
| 188161 | cttattgaaa | gacaattgag | ctgtctccta | gacaaagcct | tgtgcacctt | cccgaacaga |
| 188221 | gggtctaacc | aagcaggcag | gatggggtta | taaagtaggt | ggggaggtgg | gagagactcc |
| 188281 | accctcccag | gtgggctgag | gatggaggta | aggccctgca | acaggacaga | gggaaaagtg |
| 188341 | gggatgagac | atgggaggcg | agatagcgct | cactgttctc | gctcagcccc | ctcctccatt |
| 188401 | tgccgctgac | ctgttggcct | cccccaacct | ctgagcctgc | ctctgcctag | gtaatttccc |
| 188461 | aagacccagg | aggggtgaag | ggtgaggtgc | gattgccccc | acctccttgc | ctcccgcagc |
| 188521 | atctgctcca | ggaccatgaa | caatagctga | cagctccatg | gcccttgctg | tccccatctc |
| 188581 | agcttccctg | ggcatctaaa | cctcagttgc | cRtggggtag | gaggacaggc | tgaggaagca |
| 188641 | gaagcctgag | gctgtctaga | gtctcactcc | tgcatcagca | ggccaccacc | tgtggttcct |
| 188701 | ccttgtgcaa | atttgagagg | aattgcataa | aacactggag | aaatccaaga | ggggaagtcc |
| 188761 | acaagggcgg | tggctccctc | catgatctca | gagcaagctg | gtgtcagaac | ctggacctag |
| 188821 | agcactgttg | ggtgggaagt | aggaggagag | tcctgcctcc | aggccagccg | gggaagggct |
| 188881 | ccctctcacc | tctacacgca | gcgcatttct | tggctcagct | gccctgtagg | ggatgcaggg |
| 188941 | tggggacagc | agagatctgg | gcctgggagg | gagacagtac | acaatcacat | ggctgttgcc |
| 189001 | cctccctcag | gccttgtcta | cctctgactg | tggctctctg | gcaggaatag | atggacatgg |
| 189061 | cctggcagat | gatgcagctg | ctccttctgg | ctttggtgac | tgctgcgggg | agtgcccagc |
| 189121 | ccaggagtgc | gcgggccagg | acagacctgc | tcaatgtctg | catgaacgcc | aagtaccaca |
| 189181 | agacacagcc | cagccccgag | gacgagctgt | atggccaggt | gaggataaag | tcgggtctgg |
| 189241 | ggcaggggag | agagctgcct | ttgacagaga | aaagttagca | gggtgaagtc | agctgtggaa |
| 189301 | ggtgatgaag | gcagaggatg | actgctgtga | tcctggaggg | cctcccctgg | gaggacacca |
| 189361 | aatctacaat | aataaaggaa | ccacatacct | aacacccact | atgagcctat | gagccttgtg |
| 189421 | ctttcactca | tgccatgtta | gtgaatatgc | ccaaagggca | gggtgggtgc | gtggtagtct |
| 189481 | ctacttacgc | aaatgaggaa | ataggcccag | agagggcgca | ggtgcaagtg | ggaaatgagg |
| 189541 | agagggactg | tccatacctt | tcccagcctt | aattgtgtgc | cagcccacag | agctcaatgg |
| 189601 | cacagtagaa | gaggagctgg | gcccatcatg | gtcatggtgc | agcctacatg | tacaaacagt |
| 189661 | ccaggtttcc | acccccatta | ggtactgaag | agacaacgac | caatccaata | tgctggggag |
| 189721 | acttcccagg | caagagacca | ttggccttga | cctgggaaga | tgagtaagag | ttttctagga |
| 189781 | ggaaaaagcg | ggaaagggca | gcctggtaga | ggacagcatg | cacacaggtc | agagggtgat |
| 189841 | ggcacgagca | atggcgggtc | cagtgtggcc | agagccagcg | gtgccactgc | ccacaaggaa |
| 189901 | ggggagggga | ggccagggcc | ctcatgccac | aggtaaggcc | actgaggcag | ctcggggagt |
| 189961 | atgagctcca | atttgaattc | caagctcagg | agagtgcctg | tatttcattt | ctctggtctc |
| 190021 | ctggcctgct | ccctagaagg | gttcacattc | ccagagggtg | aggatgtgcc | cagggagaga |
| 190081 | ctgtggcatg | gacaggctcc | gagggctaaa | gcaaagagag | gacagcctgg | aagccctgtg |
| 190141 | acatctgagt | cattcccaac | attccatttg | cttattttaa | aatcagggta | aaatttaaaa |
| 190201 | taaataaata | aaataagttc | tccattttag | ccatttttaa | ctgtacaggt | cagtggcatt |
| 190261 | aagtatgctc | atgtatgccg | ggtgcagtgg | ctcacgcctg | taatcccagc | actttgggag |
| 190321 | gccgaggtgg | gcggatcacc | tgaggtcagg | agtttgagac | cagcctgacc | aacatggaga |
| 190381 | aaccctgtct | ctactaaaaa | tacaaaaaaa | aaaaaaatta | gccgggcatg | gtggcccatg |
| 190441 | cctgtaatcc | cagctactcg | ggaggctgag | acgggagaat | tgcttgaacc | tgggaggcag |
| 190501 | aggttgcagt | gagccgagat | cgcgccattg | cactccagcc | tgggcaacaa | gagcaaaact |
| 190561 | ctgtcaaaaa | aaaaaaaaaa | gtatgctcat | gtggttgtgc | aaccatcacc | accatccatc |
| 190621 | tcctgacctc | tttcattctc | caaaactgaa | atggaaactt | tgtgcccacc | acttcatttg |
| 190681 | cttttcagaa | ccttctaaag | cacctactct | ttgccaagaa | atggtgcaga | tgtagacttt |
| 190741 | gagagataca | gatgattatc | attctcaggg | ccatgagcta | tatgagagtg | atgatatttg |
| 190801 | ttgggccact | tctatagcca | gggagtactt | ttcattatat | tcagtaactc | tttcagaggc |
| 190861 | agaaacccct | gaccctgact | ggcaaaaccc | atgtctgcca | aaccccaaga | cccatgatgt |
| 190921 | gcaaggggtc | ttgcaggaag | accaagagtt | gggacagcca | aggaaaagca | agtgtgaagt |
| 190981 | tgtgctggcg | gggaagcatg | ttctgtgtcg | gccggcactg | ggcgtggtgg | cccagtgggt |
| 191041 | aggtctggct | ccactcccat | ggatttccct | attgtttctc | ctggttgctc | agacctgtca |
| 191101 | cgcctctgcc | atcacttgac | cctaggtgca | agggttcagc | ccagaaatKt | tatgcaattg |
| 191161 | actcatgatt | tctcaggttt | tctgcatcct | ggcctagagt | gatttccaaa | gaaaaacctc |
| 191221 | caccatttct | gcttgtcttg | cctgcattgt | atttaccttt | ctaggattgc | cttttccaca |
| 191281 | tttagtcaag | cccgggttca | ggcccacgtt | caggctacag | ctcctctgtt | cccccaccac |
| 191341 | tctcaggatc | | | | | |

[0425] Following is a NUMA1 region genomic nucleotide sequence that includes the NUMA1 SNP “NUMA1-AA” (SEQ ID NO:).

TCTCTGCCCGACTACAGTCTACTAAACCTGAAGCCCACATGCCCTTCAGTCCACATCCGTAGTGGCCTTTCCCTGACCAGCTCCTG
CCCTATCTTTGCCTTCTTTGAGACCAGACACAAAGTGTCACACCCTCTTTGCATGCACAATCTCCCGTAGGAGGAAGGGAACCAAT
CCTCAGGGAACACCCAGGTGCAGAGCCT[-
/T]ACTCTAAGGCACTTGGCATGTGAGCTCTCTTAGGACAGGGGAACTTGTTTCTCCTCAAAGCCACTCTGAGAAGTCACTTCACC
CTCTTTTCAGAGGAGGAAACTGAGTTCAGAGATTTAAGCAAATTGACCAGAGTAACAGTGACTAAATGGCAGAGTAAGATTTGGTC
CACCTAACTCCAAAAGCCCATGGGGGCTTAT

[0426] Following is a NUMA1 region genomic nucleotide sequence that includes the NUMA1 SNP “NUMA1-AB” (SEQ ID NO:).

AAACCAATCACAGCCATCACACCTCTAATTCAGAACTACAAATCAACATTTAGGGTCACAGCCCAGTACCCGGGAAGCCGCCAATT
ATGGGATAAGGAAAGGGGCAAAATATGCAGGTCTCTGGAGAGACTGAAGCATAAGACAGGTGCTGGGACATTCTTCTCAACCCTCT
CTTGGGGAGCCTTCCAGACCACCTCAGCCCTGAGGGGCCTCCATGCACACACCACCTTAACACCCACCTTAAAGGAAAGGTCTCCA
TTCTCCTCCGAAAGCTGGTTGATTTTGCGATCCATCTGGCTCTTCTCTGTCTTCAGGTCCTGGCACTGCTTCAGGGTTTCATGCAG
CCGCATGGTAAGGCTGCGAGCGAGGGAAGCAGTGAGAAGAGAGTATGGG[T/C]TCCTGGCTGGGTGAGGGGAGGGGCTGGGGCCT
GGGAAGGAATGCAGGGAGAGCTGTACCTCTCATTCTTGTCACGCAGCTCCTCAAGCTCCTTGGGCTCCAGTGGGCTGGCCCCCTGC
TTCTCATTCAGCAGGGCTAGGCGGTCAATGCGCTGCTGCATCATGGCTATCTGTGCATCTGCCCAGAGTGGAGGGAGGAGGAGAGG
AGAATCAGAACTATGTGCATGAGCGGAACTATCTGCACAGAACTATGTGCACAAGGGGAAGGGAGGAGACGGCATAGGGAAGAGGA
GGAATATGGTATCCAATCTAAGGGAAAGAGAAGATGGGGACAAAGACAGAACCTAGCTTCCAGGAGG

[0427] Following is a NUMA1 region genomic nucleotide sequence that includes the NUMA1 SNP “NUMA1-AC” (SEQ ID NO:).

AGACGGCATAGGGAAGAGGAGGAATATGGTATCCAATCTAAGGGAAAGAGAAGATGGGGACAAAGACAGAACCTAGCTTCCAGGAG
GTCAGCCTGACCACAGGCCCAGGGCTGAGCTCTCAGCTCCAGGGGCCAGCAGAGGGGACAACATGGGAGGCCAGGGGACATCCTTC
CGGCAAGTCTATTCACACATCTGCCAGTGTGCCAGCCACCTACCCTTCTCGGTGAGGAGCTTGCGGTTCTCAGCTAGCTCCAGCTC
CAGCTCATCCCTATTACTTCTCTCATCACCAAGCTGCTTCTTCAGCCGTCTCATCTGGAACTGTGGGGTCTGCAGGATATCACCCA
TGGGAGAAGCTGGAGAACCTGAGAGAAAGCTGAGGAGGGAGAAGGCCCATATGCATTGGTAAGCGCCTAAGAT[C/G]TGAAGCAA
TCAGCAACAGGCAGCAGTAAGGGAGCGGGGTCTATGGAAGTGCGCACTAGCAGCTGGGAGGCCTGTGCACCTGGGTTGTTTGCAGT
GCTACCTCAAGCCTCATGACATGATCTTGGGAAAACTTTTCTTCTCACTGCCTTAATTTCTTTGTCAGAAAAAAAAAAAGTGATAT
ATTCTCCTTGGCTCTGCAGAGATGTGCTAAGAGAAGAGACTTCATTGTAGTCTCCGAGGAAGAAGGGTATTCCATAAACAGGGAAC
AGCTTTTGAGGGAGGCCTTCTGCACATGACAAATCCCAACCACTTCC

[0428] Following is a NUMA1 region genomic nucleotide sequence that includes the NUMA1 SNP “NUMA1-AD” (SEQ ID NO:).

GCCTGCTACCACATCGAGCTAATTTTTTTTTTTGAGACGGAGTCTCGCTCTGTCACCCAGGCTGGAGTGCAGTGGCACGATCTCGG
CTCACTGCAAACTCCGCCTTCCAGGTTCACGCCATTCTCCTGCCTCAGCCTCCCAAGTAGCTGGGACTATAGGCACCTACTACCAC
GCCTGGCTAATTTTTTGTAT[T/G]TTTAGTAGAGACGGGGTTTCACCATGTTAGCCAGGATGGTCTCCATCTCCTGACCTTGTGA
TCCACCCACCTCGGCTTCCCCCAGCTAATTTTTTATATTTTAGTAGAGACAAGGTTTCGCCATGTTGGCCAGGCTGGTCTTGAACT
CCTGACCTCAGGTGATCCGTCTGCTTTGGCCTCCCAAAGTGCTGGGATTAGAAGCGTGAGCCACCACGCCCAGCCTTTTTTTGTAT
TTTTAGTAGAGATGGGGTTTCGCCATGTTGGCCAGGCTGGTCTCAAACTCCTGACCTCAGGTGATCTGCCCACCTCAGCCTCCCAA
AGTGCTAGGATTACAGGATAAGCCACTGCACCTGGCCAGCTCTAGTCTTATTTTGCTGAAAAAGGGAGGCAATTGAGGGAAAGGCC
TGCTGGCCTGGGACACTGGAGACGTGGGTTTACCACACAGCCTTGGGAAATTTATCTAACTCTCTGGGCCCCTTTGTACTTTTCAG
CTTAGAGATTTGGGGGTTAAAGTAGATCAGTAATTTCCAAACTCTTCACAGAGTACCAGGGTCTGTAGAGATGCCTCACAGGCCTC

[0429] Following is a NUMA1 region genomic nucleotide sequence that includes the NUMA1 SNP “NUMA1-AE” (SEQ ID NO:).

CACACAGCCTTGGGAAATTTATCTAACTCTCTGGGCCCCTTTGTACTTTTCAGCTTAGAGATTTGGGGGTTAAAGTAGATCAGTAA
TTTCCAAACTCTTCACAGAGTACCAGGGTCTGTAGAGATGCCTCACAGGCCTCCATGACAGGCCAAGAAGATGGCCTATGATCTCT
GAAACCAGCCCCCACTTCAATCAGATCAAAGTAATTCCATTCTGTTTTATATGCTGGGATTCTGCTTAAGATTTCATTTGATAAAA
AGAATCTTCTGCTTAAAAACATTTGCTTGCTGACTCCATATTAGGTATTCCCAGAAGAGCCTGGTCTGCTTTCTCTCTCCACCCCC
CAACCCGCCATGTCTCCCTTCACCCCCAGGGGCTGTTGGTAATTCCA[T/C]TGAGTCTGAGGCAGGGCCCCCAAGAATCAAAGCT
GCCTCAGATTCAGGTCTGTTCAGCTTTGACAGTGTTCCCATCATCACTGGACAAGGGACAAGAACAGTCTCATCCAGTCTGAGGTT
AGCCCAA

[0430] Following is a NUMA1 region genomic nucleotide sequence that includes the NUMA1 SNP “NUMA1-AF” (SEQ ID NO:).

TCCAAGGAAAAGCAAGTGTGAAGTCGGGCTGGCAGGGAAGCATGTTCTGTCTCAGCCGCCACTGGGCGTGGGCCACGGTGTGGGAG
GTGGGTAGGTCTGGCTCCCCTCCCATGGATTTCCCTATTGTTTCTCCTGGGTGCTCAGGCCTGTCACGCCTCTGCCATCACTTGAC
CCTAGGTGCAAGGGTTCAGCCCAGAAAT[G/T]TTATGCAATTGACTCATGATTTCTCAGGTTTTCTGCATCCTGGCCTAGAGTGA
CTTCCCAAGAAAAACCTCCACCATTTCTGCTTGTCTTCCCTGCCTTGTATTTACCTTTCTAGGATTGCCTTTTCCACATTTAGTCA
AGTCTAGGTTCAGACCCACGTGCAGGCTATAGCTCCTTCGTTCTCCACCACTCTCAGGATC

[0431] Following is a GALE genomic nucleotide sequence (SEQ ID NO: 5).

>1: 23536001-23622950

| | |
|---|---|
| 1 | ggcaacctag tgagaccttt tctctacaaa aaataaaaat |
| | aaaaaaatta gctgggcatg |
| 61 | gtggcataca cctgtagtcc caagctgagg caacaggatt |
| | acttgagccc aggaggtcaa |
| 121 | gactgacagt gagccgtgaa tgtgtcaggg cactccagcc |
| | cgggcaacag agtgagaccc |
| 181 | tgtctcaaaa aaaaataaag taagggctgg gtgcRgtggc |
| | tcatgcctgt aatcccagca |
| 241 | ctttgggagg ccgagacggg cggatcacga ggtcagaaga |
| | tcgagaccag cctggctaac |
| 301 | acggtgaaac cccatctcta ttaaaaatac aaaaaaaatt |
| | agccgggtgt agtggcgggc |
| 361 | gcctgtagtc ccagctactc aggaSgctga ggcaggagaa |
| | cggcatgaac ccgggaggca |
| 421 | gagcttgcag tgagccgaga tcgcgtcacc actccagcct |
| | gggcgactga acgagactat |
| 481 | actgagtaga ctatacttgc tgcaaaaatt caaaaaagtg |
| | tacggagcag atgagagcct |
| 541 | ccttgcccat cctcctcccc tagtatagcc ttgaattcat |
| | ctcccaaaca gaataggatg |
| 601 | ggtcttttag ttactctcgc agagggctct gtagtgctga |
| | taagagagct gaggagcccc |
| 661 | tcttaggttt tcagatgaca cgtcaggcta gccttatatt |
| | taataattta aatttaataa |
| 721 | taattatttc agttttcaag aaacttactg aatctcacct |
| | atgtgctaaa tgttgctgat |
| 781 | tgaagatggg taaatagcct ctgaccttag ggatctcatt |
| | cctgtgttga acactcgtgt |
| 841 | gtaaaccaag ggttacaatg gtaatccccc agtgaataca |
| | tacagagtac caattttaga |
| 901 | agtggttgaa aagttttttt aaaaaatcag agaattacac |
| | atgtataatt agctgctcat |
| 961 | cctagaagtc atatatccag accaggcgtg gtggctcatg |
| | cctgtaatcg cagcactttg |
| 1021 | ggaggctgag gcgggtggat cacttgaggt caacagttcg |
| | agaccagcct ggccaatatg |
| 1081 | gtgaaacccc gtctctacta gaaatacaaa aattagccga |
| | gcgtagtggc gcatgcctgt |
| 1141 | agtctcagct actcgggagg ctgaggcaga agaattgctt |
| | gaacctggga ggcagaggtt |
| 1201 | gcagtgagcc cagatctcgc cattgcactc cagcctgggt |
| | aacagagtga gactctgtct |
| 1261 | caaaaaaaaa aaaaaaaaaa agtcatatat ccaaatgtaa |
| | gagtactttg caggtaagcc |
| 1321 | tgactcagtc tgacataggg gtggctgtct gggagcagca |
| | cacccactcc aggatccccc |
| 1381 | agaagcattc gttgtttctt tctgtttttt tttggttttg |
| | ttttttctgt tgcccaggct |
| 1441 | ggagcagtgg tgcgatcatg gctcactgca gtcttgatct |
| | cctgggctca aatggttctc |
| 1501 | ctaactcagt ctcccaagta gctgggacca caggcacgca |
| | ccaccatgcc tggctaattt |
| 1561 | taaaattttt gtattttttg tagaggctgg gtcttactac |
| | gttaCCCagg ctggtctcaa |
| 1621 | actcctgggc tcaagcagtc ctcccgtctt gacccccaaa |
| | gtgctgggat tacaggcatg |
| 1681 | agccactgtg cccaacctca ttgtttcttt tcattttggt |
| | tattgagctc tctctggata |
| 1741 | acatctgcag aatgtttcat gtgtcccgag tatgtgccag |
| | gcCaattact cagcaattct |
| 1801 | gcttcaagaa tcagtctgta ttccattaca ccagtggtac |
| | attttcaaaa tggaaggaat |
| 1861 | ataaaatgta aaagtatttg ctacgcagag gagggagaca |
| | ctactgctgg gactagaatc |
| 1921 | gaagttttct cacacccagt tcaatgcctt ttctacaaca |
| | tccctcagtt gagccttagg |
| 1981 | gtaccaagtg gatggtcatt agtcttgtat ggactttaYa |
| | tccaatgctg attataaggt |
| 2041 | ctagatgatg ctaggtggca gagattcaaa gttggacagg |
| | tcggttactg tacttgataa |
| 2101 | ataaacagcc cagtggcaag acagataaat aaactgacca |
| | tttacaccct gaaaaggtgg |
| 2161 | tcagttgctt agggaactgg gggaggggcg ccaaatggag |
| | gagtagggac atggtagaga |
| 2221 | gggcttttca gcatagtgag tgaatgaatg ctcatttgaa |
| | gaaacaactt gtgtttaaga |
| 2281 | tgtttttctt tcttccagag ctagaatctg gaagaatctc |
| | tgggctttcc tgctttgagg |
| 2341 | gagagatcag gctaggtgca ttgccaattt gctgctgaag |
| | atctgattag gttctgcttt |
| 2401 | gatgtgatca aatgagatgt aatcagtgct ggtactttaa |
| | gtgagtttgc aactatttag |
| 2461 | ttgctctttt tagtagtagt attagtaatg gtaaaactta |
| | gtgcttttag gatgagagta |
| 2521 | gacggcctga agaataatat cttgggctct tctaatcaag |
| | ccatacggct cattggcaag |
| 2581 | tcatcagagg aaacatctat ctatctatac attcatgcaa |
| | taagtattta tttagtgcct |
| 2641 | atgtgccaga cactgtttgt ggggaaaaca agacacatgg |
| | gctattattg cctcatggaa |
| 2701 | ggaactaagc tgtttggatt ttgaaaaatc cctttctctg |
| | ggcctcaatt cctcgacctg |
| 2761 | ttcagaaatg tgcgctcaca atggtcctag acatcttaga |
| | ttcaggttcc attttcagtt |
| 2821 | ctttcctgtc ctgcggccat ctgcaagtta atttggtctc |
| | cctgaacctc agtttcctca |
| 2881 | tctgtaaaat gaagatcata caactcgttt catcaggttg |
| | tactgaggct ggaaaagata |
| 2941 | gtctaactac tgacgcatcg tgtgctcagc ctagggtggc |
| | tgctaccgcg ggtgcctgcg |
| 3001 | gactcctagg acgggcacca gcccgggacc cctgacaagg |
| | tgttgattag ggtgtggcta |
| 3061 | agccccaggc gggagaaagc gttggcattt ataaggccag |
| | ggtctggcgc gstggcctca |
| 3121 | ttccgtcttg aagtagaccc tggagaggtc ttccaggctt |
| | gggctcagca cgcgagcaca |
| 3181 | gggagcgggg gtgccggcgg cggaggcgcg tacggcccga |
| | gcagccccca gcccccagcg |
| 3241 | cgcacacttg ggccaggggc gcgaggagtg cgcggccgcc |
| | gggtgggcgc tggggagcgg |
| 3301 | gccctggggg cggagcctgc agcccaccgc cccccacaca |
| | ccccagccga ggcccggaag |
| 3361 | gggccaggcg cgcttccgtc tccgccgggg atgcacggag |
| | ggcggagctg cggcccgagg |
| 3421 | acgcgacgcg agcccaRttc cggcgaggag gccgcgccag |
| | tgacagcgat ggcggcggag |
| 3481 | tcggcgctcc aagttgtgga gaagctgcag gcgcgcctgg |
| | ccgcgaaccc ggaccctaag |
| 3541 | aaggtaagcg agggggcggc gcgtagcggg atgggcgttg |
| | ggtcggtgag ggccccgtaa |
| 3601 | cggtcgcggc ccgagcgtgg cggggttcgg gggctgggac |
| | cctgagccag gccccgcggg |
| 3661 | gctggggtcg tgaagttcgc ggccattgac cgctgcccgc |
| | gcgttgggac cccgtgcgtc |
| 3721 | gggcgtcggg acgcggggcc ccggccgctc cccctccctc |
| | acgggcccgg gatgggggcg |
| 3781 | cgcccggtgc ggacaccgcg tgcctagcgc ttcctcccag |
| | aggcgctccg tggcgtcccg |
| 3841 | agccagctgt ttcctgcggg agagcgtgcc cggggcggga |
| | gggcgctggc cgccgcctcg |
| 3901 | ttggcctccc ggtgcctgcg ctggtgcccg gctccccgcg |
| | gagcggcgcg gactccccag |
| 3961 | cgggtgcgtg ttcgctggga ggagaagacg ggcgcccgaa |
| | cgctgcggag cctggactcg |
| 4021 | cggtctggtc cgcgcctctc ggagacgcgg ttactactct |
| | ccggctggat atcagagcgt |
| 4081 | ggacctttcg ctttctcagt gaatcccttt caaaacagaa |
| | taaagcctcg cgtcacctaa |
| 4141 | gcatactcct gaaaacttag gttggaattg aaaaagaggc |
| | gggggcccgg ggttggaagt |
| 4201 | cgcagctagg tttccttttg gccattaata ggaaggtaag |
| | agctaccgtt tctcgttgtt |
| 4261 | cgagtgatgg acaaccattt ttaattgtag ttaactagtt |
| | tttgttgttt attgtacaaa |
| 4321 | ctgaaYatta agttaaacgc gttcttgtac cttttcatct |
| | ttctgtcact cacttctctg |
| 4381 | gtctccagga gacagtctgg tggttgtcag gatttttttt |
| | tttctttttt ttttttgagg |
| 4441 | cgagtcttgc tctggtcgcc caggctggag tacagtggcg |
| | cgatctcggc tcactgcaac |
| 4501 | ctccgtctcc cgggttcagg caRttgtctg cctcagcctc |
| | ccgagtagct ggtattgtag |
| 4561 | gcgcccgcca ccacgcctgg ctaatttttg tatttttagt |
| | agagacaggg tttcaccatc |
| 4621 | ttggccaggc tggtcttgaa ctcaRYtgtc aggatttttt |
| | aagtggaagt acaacgatga |
| 4681 | aaaagcactt atgtgtttgg cattctccgt catcattctg |
| | gccggggcgg gcagttctag |
| 4741 | gagttggaac tcagtcctgg tggaaaagga agtcgtggag |
| | ggagggctag ggccgtgggg |
| 4801 | gaactgctct gctgagcctc ttcctcacct gctgcttcct |
| | aggactaacc tgaaaggcta |
| 4861 | aggtaccagg ctgaaagtca gtgctcagaa aaccaatcgt |
| | cattctttgg ggtttttttt |
| 4921 | cttgaagagc cactttctct ttaccttgtt ctagcctgtt |
| | ggaggtaggg tttctgcaat |
| 4981 | tccaaaggcc gtacacagcc tctcaccatc agaccacttt |
| | ttaaggctct tcgttcatac |
| 5041 | ctagctcgaa gattcacttc ctcaggaagc cattttagtt |
| | acaaatctgg gaaaacttaa |
| 5101 | aatgctttca ttgtgccatg ttttctgttg cagcttcagt |
| | accgtaccta gtggtcaggc |
| 5161 | atacttacaa gtttcttttt acagtaaccc cttgtggaca |
| | tctaataaat ggtcattatt |
| 5221 | ttttagtact agtttgtttt cctgaacact gtaagatctg |
| | tgactgacgt ttgatacctt |
| 5281 | aaagcagtgc catataataa ctacccacta tttgttcttt |
| | atttctgtca gataaaaatg |
| 5341 | ttctatgtag tgtctacagt catttttttt ttaactagaa |
| | tttagatttg gaagtagttt |
| 5401 | ttctattagt tgatttgcat gaaatacaaa attaggaaaa |
| | ggcttattcc acctcaacct |
| 5461 | agttgaacta ttaatgattt tttttttttt ttgaggattt |
| | gggctctttc tagatagaaa |
| 5521 | atcaccctga acttctagct ttgcattgtg aagtgagcat |
| | catgaagatg agaaaatgtt |
| 5581 | gggagatcat ttttgcaaag ggcataatag tcggcattca |
| | gatatgagtt aactgcagag |
| 5641 | ggaaaattgc aagctgtcat gttggccttg ttcctctcaa |
| | ccttctggta acctaacaag |
| 5701 | ctcctacagg ttgtatgtga aattgcaaga tgattatata |
| | gccctgttga atttacaacc |
| 5761 | agatcttgct ttcaaaccat tattagccaa gggtttgatt |
| | ccacacctgt gttcatggat |
| 5821 | tttttggtaY tagacattgc tgtaactctg ttttcacttt |
| | ttcatctgtt atcttggctc |
| 5881 | acttaaggga gaaggtatca gcagcctagg accacttggt |
| | ttctgttttt atgtttcata |
| 5941 | gttcatggct gataaaaatt acctgtcctt aggccgagtg |
| | cagtgcctca cacctgtaat |
| 6001 | cccagcactt tgggaggccg aggtgagtag atcacctgag |
| | atcaggagtt cgagaccagc |
| 6061 | ctggccaaca tggtgaaacc ccttctctac taaaagtacg |
| | aaaattagcc aggtgtggtg |
| 6121 | gcaggcgcct gtaatcccag ctgctcggga ggctgaggca |
| | ggagaacact cgaacccggg |
| 6181 | aggcagaggt tgcagcgagc tgagatcgcg ccattgcact |
| | ccagcctggg caacaagagc |
| 6241 | gaaactccgt ctcaaaaaaa aaaaaacaaa aaaaacacac |
| | acacacagtt ggccgggcgc |
| 6301 | agtggctcac gcttgtaatc acagcacttt gggaggccaa |
| | gaggggcgga tcatctgagg |
| 6361 | tcaagagttc gagaccagac tggccaacat gatgaaaccc |
| | catctctact aaaaataaaa |
| 6421 | aaattagttg gtcatggtgg tggtgcctgt aatcccagct |
| | actcgggagg ctgagacagg |
| 6481 | agaatctctt gaacccagga ggcggaggtt gcagtgagcc |
| | gagatggcac cattgcactc |
| 6541 | cagcctggac aacaaKagca aaactccWtY tccaaaaaaa |
| | aaaaaaaaaa aaaaaaggat |
| 6601 | cctcgtcctg tgttacattt tcactgtgaa agctaccaag |
| | aacattttga tggcaggtga |
| 6661 | cattaaaaat attttttgct tttttgggtt gaaggattgt |
| | acaggggaca actgagatgc |
| 6721 | ctcaacatgt accttgcaaa tgtttgatat ttctcagttg |
| | cctgttacca gttcttacaa |
| 6781 | gctctatagt tggtatcttg tttgataaca gcaagtttcg |
| | atccacctga ggatgcccaa |
| 6841 | tgtgcctttg ccttgttatt gctttgttct ttcttgaaat |
| | ttactgaaaa tagaggggtt |
| 6901 | gtgaagtcct tttttctctt gtgttagact aaatgagtct |
| | gaaaatcttg agggttttag |
| 6961 | ttttgtctgc ttttaaatca cccctaataa cccaaagtaa |
| | agcagaaaga caggatttgt |
| 7021 | tcttccagtt agtgctaggc tttgagataa acacacccac |
| | agtgacttcc agcctcatcc |
| 7081 | ttatatgttg gctttgtaga ggtcctggga cacctttgtt |
| | cccttggtga cctcctttac |
| 7141 | tatgtgggtt ctgaactgtc taatgacatc acaggaggag |
| | tttttctgct ttcttgcaag |
| 7201 | tatgctaaga agtatatgtg ctgccgctct attttcattt |
| | cctaaggaca gtgttctgat |
| 7261 | gttggatgct tctcctggct ttacttaact gtagtagaca |
| | catttgactt tccagcttgt |
| 7321 | taagcaagtt acctaacctg attgggttca gttgcaatat |
| | ctgtcaaatg gggagaataa |
| 7381 | catccacttt atagagttgg ttagtgggaa tgaaatgagg |
| | taacgtgtaa gagcttagtg |
| 7441 | tagtagctga cacacaatag atggtatgtg aatattccca |
| | acctacccct tccaaggaat |
| 7501 | ggcattatga gagaaccact tgtttttgac cttttcagtg |
| | atttaaaatt ttcctttaag |
| 7561 | tgaaggaatt ggcattagtc tttgcaccca tagcttgggt |
| | ggcaagaaac acaaaatttt |
| 7621 | tcctgagttg gatgatggtg gtgataggat ttgaagtggg |
| | ggataatttt cactcatcta |
| 7681 | tgaaggtgag actccctaga tatgccactt ggcctcttac |
| | ttgatctcaa gattatcact |
| 7741 | tgtgatccaa ttgctctgtc tggtgaccat gttaagtaat |
| | gattgaagta gaatgaccag |
| 7801 | aaaaacagac ttgttactcc acctaatagc aatatggcat |
| | accaattata gtctgggcca |
| 7861 | cacatggtaa aagcagatct tgttatataa tatttaaatg |
| | caaaggtaac cacagttatc |
| 7921 | tattttaaac tacttgtatt ttgaagcact ccttgtatgg |
| | taagtatgtt tagatacacg |
| 7981 | tagacatttc ctagagaaag gtttggccag tcataacttt |
| | tgttagagca agtaggaatt |
| 8041 | ggctgaggaa tatctggttg aagatcaagg gcagaacgct |
| | gaaagctgtc agtcgatgaa |
| 8101 | tgaaatgata agtatttagt gagctttcat agtgttctag |
| | acactatgac taaggactgc |
| 8161 | acatggtttg tctctgaatc ctcatagttt gtgaagtaga |
| | gacaggacca agttcctatt |
| 8221 | ttgcagatga agtaactgaa gtttggggag gtttttgact |
| | tattcaagat cactcatcga |
| 8281 | gtgacaaagc cagattgtca agcctgtctc tgactccaga |
| | actccatctt aacagctctg |
| 8341 | ctgtactgat tttgacctag ttttaggaac tataggaagg |
| | aaatgtgatc aaacccagat |
| 8401 | cacttttcta atctacccag gcattttgtg tccaccgtta |
| | acatccaagc tctgattctg |
| 8461 | gcaacttgaa attactcttg gctttacact tatgtagaag |
| | aaaacaattc tgttaaacac |
| 8521 | tgtggccctt ctggaaacat gatggtcttt tcctgtagag |
| | gccttttctt ccttttactt |
| 8581 | cctctgtgcc aggtccatgg gtaattcccc taaaattggt |
| | acctttctca taaattctat |
| 8641 | caaaactagg gcaaaaatga tagttgttga tggcttttat |
| | cagagttggt aagttttgat |
| 8701 | tctcttctct acatcttatt tccccttggt gtagcacagt |
| | ggttgaaagc agggaatcta |
| 8761 | aagccacaga cctgagtgaa tcttgcccca cttgcatctt |
| | gggacaagaa acataacttt |
| 8821 | tatgagccta ttttcatact tgtaaaatag ggatattact |
| | tactactgta aataggcata |
| 8881 | atacttatac tcattactgt aaatggttag cactaagcac |
| | ttaataatca gatattcttg |
| 8941 | ttaaagtgaa tttgactatt gaaattaatg ttttcttctc |
| | tgcagctatt gaaatatttg |
| 9001 | aagaaactct ccaccctgcc tattacagta gacattcttg |
| | cggtaagaac tgtgtgactt |
| 9061 | taaatattat ataatgatat cccattccct tctcactgga |
| | gagtgtgtag aataaggtta |
| 9121 | caagtatggg ctttggaagt gaaagaaacc agacacaaaa |
| | ggccatatat tgtctgattc |
| 9181 | catttatatg aaatgtccag aataggcaaa tccatagaca |
| | gaaagtagat tagtggttgc |
| 9241 | caggggctag gagaattggg aggaacagga tttcttttta |
| | gggtaatgta aatgttctgg |
| 9301 | aattagatgg ttataatggt tatataatat tgtgaatgtt |
| | ctggaaacca Ytgaattatg |
| 9361 | tactttagtt aaagtggtga atattgttaa atgactttat |
| | ttcaaaatta gaattaaaag |
| 9421 | aacattgact ttggcatcaa ttagtcccag attcaaatct |
| | gagttctatg actttaggct |
| 9481 | gttcctatgt aaaatgggtc tgattcctgc ttcacagggt |
| | tattgtaaag actgattcag |
| 9541 | aactgtatgc aaagctctta tcttagtgcc taacacctgc |
| | cctaatcact cttgttatta |
| 9601 | aagttctgaa cttggtacgc tttgctactg tgtgtcatta |
| | gagatttggg gcatagacac |
| 9661 | aaagtaattt agtgttaaga tttgcagggt atgttgtagg |
| | aaggaagtat tgcttgttga |
| 9721 | gtttctcaaa gtagaaagcc ttatttcttt agaaaaacgt |
| | tagcctagtt ccagacccct |
| 9781 | ctaacaatta ctttgtcaaa ttttaggaga ctggggttgg |
| | gaaaacagta aatagcttgc |
| 9841 | gaaaacacga gcatgttgga agctttgcca gggacctagt |
| | ggcccagtgg aagaagctgg |
| 9901 | ttcctgtgga acggtaagaa catttctctt taggtttgtt |
| | caatttcatg gttaaattta |
| 9961 | cagatagaaa aggttttctt tattatttct cttttgcctt |
| | ctgaaattgt tttgcctcaa |
| 10021 | ttataaaaaa taatccatga tcattgtaga atattagaaa |
| | atattaaaaa tagaaatcaa |
| 10081 | aatttcctat ttctatcacg caaagacaaa cgttatgaac |
| | attttggtac gtttcttttt |
| 10141 | tttttttttt ttttttttga gacagagtct cgctctgttg |
| | cccaggctgg agtgcagtgg |
| 10201 | cgtgatctcg gctcactgca agctccgcct cccaggttca |
| | cgccattctc ctgcctcagc |
| 10261 | ctcctgagta gctgggacca caggcacccg ccaccacgcc |
| | cggctaattt tttgtatttt |
| 10321 | tagtagagac agggtttcgc cgtattagcc aggataggat |
| | ggttttgatc tcctgacctc |
| 10381 | gtgatctgcc cgcctcggcc tcccaaagtg ctgggattac |
| | aggcgtgagc caccgcggct |
| 10441 | ggcctggtat gtttctttct aactgctcct taaatggcat |
| | ttttttaagt tgtgaactag |
| 10501 | ataaatagtg agcagccccc attttatata acaaattaaa |
| | catgtcccca tgttttaata |
| 10561 | aatctccaca ttttcatgta tatgagatat ttgatctttg |
| | catcttgtgg ttaaactcac |
| 10621 | catttctcat ttgggttttc ccagttttaa gatttgagta |
| | tctttaagca taacctactt |
| 10681 | atcttcttct taagaccttg ttgtttctaa ctctgcatct |
| | tcacttcttt ggtgagttca |
| 10741 | gattctgtga ctttgtccct caagaagcaa gatttagacc |
| | tactttgtct gctttttctt |
| 10801 | ttattttaga aatgctgagc ctgatgaaca ggactttgag |
| | aagagcaatt cccgaaagcg |
| 10861 | ccctcgggat gccYtgcaga aggaggagga gatggagggg |
| | gactaccaag aaacctggaa |
| 10921 | agccaYgggg agccgatcct atagccctga ccacaggcag |
| | aagaaacata ggaaactctc |
| 10981 | ggagctcgag agacctcaca aagtgtctca cggtcatgag |
| | aggagagatg agagaaagag |
| 11041 | gtgtcacaga atgtcaccaa cttactcttc agaccctgag |
| | tcttctgatt atggccatgt |
| 11101 | tcaatcccct ccatcttgta ccagtcctca tcagatgtac |
| | gtcgaccact acagatccct |
| 11161 | ggaggaggac caggagccca ttgtttcaca ccagaagcct |
| | gggaaaggcc acagcaatgc |
| 11221 | ctttcaggac agactcgggg ccagccaaga acgacacctg |
| | ggtgaacccc atgggaaagg |
| 11281 | ggttgtgagt caaaacaagg agcacaaatc ttcccacaag |
| | gacaaacgcc ccgtggatgc |
| 11341 | caagagtgat gagaaggcct ctgtggtgag cagagagaaa |
| | tcacacaagg ccctctccaa |
| 11401 | agaggagaac cgaaggccac cctcagggga caatgcaagg |
| | gagaaaccgc cctctagtgg |
| 11461 | cRtaaagaaa gagaaggaca gagagggcag cagcctgaag |
| | aagaagtgtt tgcctccctc |
| 11521 | agaggccgct tcagacaacc acctgaaaaa gccaaagcac |
| | agagacccag agaaagccaa |
| 11581 | attggacaaa agcaagcaag gtctggacag ctttgacaca |
| | ggaaaaggag caggagacct |
| 11641 | gttgcccaag gtaaaagaga agggttctaa caacctaaag |
| | actccagaag ggaaagtcaa |
| 11701 | aactaatttg gatagaaagt cactgggctc cctccctaaa |
| | gttgaggaga cagatatgga |
| 11761 | ggatgaattc gagcagccaa ccatgtcttt tgaatcctac |
| | ctcagctatg accagccccg |
| 11821 | gaagaaaaag aaaaagattg tgaaaacttc agccacggca |
| | cttggagata aaggacttaa |
| 11881 | aaaaaatgac tctaaaagca ctggtaaaaa cttggactca |
| | gttcagaaat tacccaaggt |
| 11941 | gaacaaaacc aagtcagaga agccggctgg agctgattta |
| | gccaagctga gaaaggtaac |
| 12001 | cccttcagcc ccttggtggc ttcccaccca gagcacctgg |
| | ccctgcagag ctcagaggat |
| 12061 | tgccctgcca ctgttttcct tagcttgctt ttggggggca |
| | tgttgaattt cagtgtgcag |
| 12121 | taatttcctc tgggcttcac tggttgtcag ggtatatggt |
| | accgcaaata agaattttct |
| 12181 | gcattattct cttgtgatgg gctcatctgt atttatttcc |
| | tgactgaggt ggtgtcagac |
| 12241 | atgactgtgg ccccctccaa cctggatctt cctgtgcaag |
| | atgtccagtt aatgctcccg |
| 12301 | ggaatagact gtaggaaaga gagctgtgct tctactcact |
| | gactctccac ccatgggtct |
| 12361 | gtcccctgca ggtgcctgat gtgttgccag tgttgccaga |
| | cctcccgtta cccgYgatac |
| 12421 | aggccaatta ccgtccactg ccttccctcg agctgatatc |
| | ctccttccag ccaaagcgaa |
| 12481 | aaggtaattt tctatatctt ctttttctta atgggaaaaa |
| | gatttaaaaa ttcattcaag |
| 12541 | gcagggtaca gtggctcaca cctataattc cagcactttg |
| | ggaggccgag gtaagaggat |
| 12601 | tgcttgcggc caagggttct aaaccaacca ggcgtggtgg |
| | ctcactcctg taatcccagc |
| 12661 | actttggRag gccgaggcgg gcagatcacc ttaggtaaga |
| | agttcgagat tagcctggcc |
| 12721 | aacatggtga aaccctgtct ctactaaaaa tacaaaaatt |
| | agccaggcat ggtggtgcgt |
| 12781 | gcctgtaatc ccagctactc cggaggctga ggcaggagaa |
| | ttgcttgaac ctgggaggtg |
| 12841 | gaggttgcag tgggccgaga ttacgccatt gcactcaagc |
| | ctgggtgaca agagggaaac |
| 12901 | tctatttcaa aaaaaaggag ttctaaacca ccctggtcaa |
| | cacagcaaga tgctgtctct |
| 12961 | acaagagaaa aaaagtagcc aggcatggtg gcacatccca |
| | ggtactcggt aggctgaggt |
| 13021 | gggagtatca cttgagccca ggagttcaag gctgcagtga |
| | gctctgattg catcactgca |
| 13081 | ctctagcttg ggtgacagag caagactgtt tcaaaaacaa |
| | acaaaaaaac tatcaccata |
| 13141 | acatcagatt tttgatgcat ttcctaagtg catagactct |
| | gaagtttgat ggcttgggtt |
| 13201 | tgaatcccaa ctctggtttc tgcaagttat atgaccttga |
| | gaaatatctt aatttctttg |
| 13261 | gaccttagtt gtatatattg tgtaaatggg agttataatg |
| | gtatctgccc catagggctc |
| 13321 | agtttaatga attcagaagt gatgcctttt tgctctgggt |
| | ttatcacata gtaattgttc |
| 13381 | agtaaattgc tgctgctgtt attagcagcc ctttatccta |
| | tgtgttacat aggatttttg |
| 13441 | tctgaaagaa aaaaatgtct aattttcata gcaaaagaag |
| | tagaagccac ataagggtct |
| 13501 | atcagcagga gactaacaga taaatcatgg ttcatctaca |
| | cagtggcatc ctatgccaca |
| 13561 | gtaaaaaaaa aatgtggaaa gtctatgcac tgacatggaa |
| | tgatctctca gatgtggcaa |
| 13621 | atgaaaaaaa gcaatgtatg tagtgagtat gttattaatt |
| | gattcattgg cttaaaagga |
| 13681 | ataagataca tttgcttttt tttgttgttg ctgttgagag |
| | tcttgctgtg ttactcaggc |
| 13741 | tggagtgcag tagctccatc ttggctcact gcagcctcca |
| | cctcctaggt tcaagcaatt |
| 13801 | cctctgcctc agcctcctga gtagctggga ctacaggtgc |
| | atgttgggca ggctgatctc |
| 13861 | gaactcttga cctcagatga ttcatStgcc ttggcctcct |
| | aaagtgctgg gattacagga |
| 13921 | gcttattttt aaattctctg gaaggatcta caaaaatctg |
| | tagcgtggat tgccattggg |
| 13981 | aaagggaagt aggaggctga agggggtaga aggagagttt |
| | tcactggatc acttagggcc |
| 14041 | ttttgtgttt ttcttgccct atagcgttct cttcacccca |
| | ggaagaagaa gaagctggat |
| 14101 | ttactgggcg cagaatgaat tccaagatgc aggtgtattc |
| | tggttccaag tgtgcctatc |
| 14161 | tccctaaaat gatgaccttg caccagcaat gcatccgagt |
| | acttaaaaac aacatcgatt |
| 14221 | gtaagtcaca cgcttctctc tagctctcaa gcacattgta |
| | gcacttggac cttatcactg |
| 14281 | ggtggcttgg ctgctactca gtgtcttcac ctttggtttc |
| | tctgcagcaa tctttgaagt |
| 14341 | gggaggagtc ccatactctg ttcttgaacc cgttttggag |
| | aggtgtacac ctgatcagct |
| 14401 | gtatcgcata gaggaataca atcatgtgag tattctgttt |
| | gggtgggaag agggcagttt |
| 14461 | tctggcttgt acctccagaa atagctttgt ccctgtgact |
| | ccgctgtggc tgaagggcag |
| 14521 | atcagtggtc agagcattgt tctggatata tttggtttgc |
| | cactgggcct ttaaacaagc |
| 14581 | atgttattag cacttgctcc tggcacctta agtgggcctc |
| | ttgggctagg atcagggtgg |
| 14641 | gattcaaagg gagaagaaaa acacttaaca tctcccttga |
| | gcttgcctag tcatgaaggt |
| 14701 | aaagggagaa ttctggcagc agagtagctg ggacccaggg |
| | cggggaaagc actttgtgtt |
| 14761 | gacactctga catctggtga ttggctggat gtctcttaag |
| | aaacatcaag atttatccag |
| 14821 | aatcctcctt aggatgtagg gtatacacat ttgattgcat |
| | cagctgtctc tctttaattc |
| 14881 | tgaaagttct atgacctaac accttttttt ttttttttgg |
| | agatagggtc tacctctgtt |
| 14941 | gcttcgactg cagtacagag gcctaatcat ggcttactgc |
| | atccttgaac tcctgggctt |
| 15001 | aagtRatcct cccaagtagc tgggactaca ggcacatacc |
| | accacagctg gctaatattt |
| 15061 | ttatttttta gagagatgga ctctcagact cttggcctcc |
| | tgaagtgctg ggattacagg |
| 15121 | catgagccaa cgcgcctggc caataactta acatccttct |
| | taggttgccc ctttgccatc |
| 15181 | acagttcagc gtagtgttgg gaagtacctg atttgacttg |
| | atcgcagttc taccctttgc |
| 15241 | tgattttcta aaggaaaaga ctgatgttac acagattttt |
| | gtgatattct gtcacagcca |
| 15301 | ccaaaagcaa ctagcatagt gcctcacact tcgcattttt |
| | aaaatttagg gagttatttt |
| 15361 | tttcctagaa ttgtggtatt ttaacaWact actaagatga |
| | agaccaaaaa atttttggga |
| 15421 | aactggtcac tcctaggtaa ttaaataatc agaaaaagat |
| | atgaggctgg gcatggtgac |
| 15481 | acacgcctgt aatcccagca ctctgggagg ccaaggtggg |
| | cggattatct gaggtcagga |
| 15541 | gttcgagacc agcctggaca acatggcaaa accccatctc |
| | tactgaaaat ataaaatagc |
| 15601 | tgggcgtggt ggtaagcacc tgtagtcctg gctacttgRg |
| | aggctgaggc gtgagaatcg |
| 15661 | cttgaaccca ggaggcaagg gttgcagtga accaaaattg |
| | caccactgca ctgcagtcta |
| 15721 | cacgacagag caagactctg tctcaaaaaa aaaaaaaaaa |
| | Watggaaaag tgcttgtaca |
| 15781 | caaatgatgt cctggttctg gtttcaggta ttaattgaag |
| | aaacagatca attatggaaa |
| 15841 | gttcattgtc accgagactt taaggaagaa agacccgaag |
| | agtatgagtc gtggcgagag |
| 15901 | atgtacctgc ggcttcagga cgcccgagag cagcggctac |
| | gagtactaac aaagaatatc |
| 15961 | cagttcgcac atgccaataa gcccaaaggt aacagagacg |
| | ggagagctgg gggagaactg |
| 16021 | gcaggatgag tgttctggtc aatagcaggg tgttggtggg |
| | cttggctggt gtaggactgc |
| 16081 | ttgcccctac atcaggtagc agggtgggta tttcttctgc |
| | caccgcccat tctaccctac |
| 16141 | aagtggggtt tcagggcact caaaaagccc gtggattatt |
| | taaataacag tagcatctct |
| 16201 | gctcaagaag gcagatgttc atctccataa ttccacaggc |
| | cgacaagcaa agatggcctt |
| 16261 | tgtcaactct gtggccaagc cacctcgtga cgtccggagg |
| | aggcaggaaa agtttggaac |
| 16321 | gggaggagca gctgtccctg agaaaatcaa gtaagatctg |
| | tgttcttacc tggcttttgt |
| 16381 | gtgctatcaa cccttagagg tagccatagc ggcaggaagc |
| | aaattgcttt tggtgaaagt |
| 16441 | gaggcagtgc agactgtggg ctctggaggc agacctcatc |
| | agctcagcac ttccctcacc |
| 16501 | tccctcagcc tccgcttctt ggactgcagt gcaaggtgat |
| | aattacccct gccctagggt |
| 16561 | agtcaagatt aaatggagag caaagcctgg cttatgggaa |
| | acattccctt atgctttccc |
| 16621 | ttttcccatc taaacaaaaa acacatttct gcaatgattg |
| | ttattttgtc taagccacat |
| 16681 | tagccttttc aaaatacaga tttataccaa aacagtgaaa |
| | agttagttga gattatcatt |
| 16741 | ttttctgaaa ggataatgga gacatctctg agccaccacc |
| | agaatccagg gtgatagggt |
| 16801 | ccattggtca aagccacaaa cagggtgagt catcctcaca |
| | caggccagct tcaggctgtt |
| 16861 | catgctcagg gcagatttct tgtgctcatg cctaaccagt |
| | gttgtcctgt gttgcaggat |
| 16921 | caagccagcc ccgtacccca tgggaagcag ccatgcttcc |
| | gccagtagYa tcagctttaa |
| 16981 | ccccagccct gaggagccgg cctatgatgg cccaagcacc |
| | agcagtgccc acttggcacc |
| 17041 | agtggtcagc agcactgttt cctatgatcc taggaaaccc |
| | actgtgaaga gtaagtaact |
| 17101 | tggagttcct gctcaaatat tatYtcagca ctagttttta |
| | actctcaatg tcattattca |
| 17161 | ctgtattaca ttttgtggac tgcatgttgc atgtacatga |
| | tgccttgcac atagctggtc |
| 17221 | tgaatgtcag tccctccttc cccctgcttt gtccatagtg |
| | cattatatct cttaaatagt |
| 17281 | tatagtgagt ctgggtgcag tggctcatgc ctgtaatccc |
| | agcactttgg caggctgagg |
| 17341 | caggaggatc ccttgaatcc aggagttcRa gaccagcctg |
| | gacaacataa tgagaccctc |
| 17401 | tacaaaaaat taaaaaatag ggcatagtgg tacacacctg |
| | tagtcccacc tactcaggag |
| 17461 | actgaggtgg gaggattttt tgagatggag tctcgctctg |
| | tcacccaggc tggagtgcag |
| 17521 | tgScacaatc tcagctcact gcaagctctg ccttccaggt |
| | tcatgccatt ctcctgcctc |
| 17581 | agcctcccaa gtagctagaa ctacaggtgc ccaccaccat |
| | gcccacctaa ttttttctat |
| 17641 | tttttagtag agacggggtt tcaccatgtt agccaggatg |
| | gtctcgatct cctgacctcg |
| 17701 | cgatctgccc gccttggcct cccaagtgct gggattacag |
| | gcgtgagcca ctgtgcccgg |
| 17761 | ccgaccctgt ctctggaaaa aaaaaaaaaa aaaaagtgaa |
| | agtagaaaat agtatctggc |
| 17821 | caggcatggt ccctgtctct attaaaaata gaaaaattag |
| | cccaccatgg tggcatgtgc |
| 17881 | ctataatctc aggtactcgg gtggctgaga caggagaatt |
| | gcttgaacct ggcaggcaga |
| 17941 | ggttgcagtg agctgggatt gtgccactgc cctccagcct |
| | ggatgacaga gtgagacact |
| 18001 | gtctctaaat aaataaataa atatcattgt gaatgaccat |
| | tttggcactc ttcttttttc |
| 18061 | acctaaatat aaactgactt ctctaggcaa taccacagtg |
| | ttcataatta ctaatattaa |
| 18121 | cagctaaatg acaggccctc ttactgtttt tttatagWct |
| | tataactcta gcttccaaat |
| 18181 | atttattctt tatatctaat tgggtcttcc aatttatttW |
| | tttWtttttt tttttttttt |
| 18241 | tttttttttt tttttggaga cagagtctca ctctgtcgcc |
| | tgggctggag tacagtggcg |
| 18301 | tgatctcggc tcactgcaac ctccacctcc caggttcaag |
| | cgattctcct gcctcagcct |
| 18361 | cccaagtagc tgggattaca ggtgcccgcc actaagccca |
| | gctaattttt tgtattttta |
| 18421 | gtagacacgg ggtttcacca tgttggccag gctggtctcg |
| | aacccctgac cttgtgattc |
| 18481 | gcccgcctca gcctcccaaa gtcctgggat taccagcgtg |
| | aaccaccatg cctggccRgg |
| 18541 | tcttccaaat atttattctt tatatctagt tgcgtctatt |
| | ttgtattttg ttaactttat |
| 18601 | taccatagac tatccccagt atcctaaggg gatgtcctaa |
| | cttaagtctt attctgtatt |
| 18661 | aattgcaggg cccatgggag ggtgggagtc ctggcttgag |
| | ctacagctat gctcagatga |
| 18721 | accattcagg aggcaggctg gccttcctta ggcagtactt |
| | gcatagccac cttagacctg |
| 18781 | tttctacact ggacagattg ggggtagacS tgctgtttac |
| | tggtttggct atttgtgagg |
| 18841 | caaagttaag ttatgactga gtatggcctt tagagtctgg |
| | caagggccgg ggcacagtgg |
| 18901 | ttcacacaca cctgtaatcc cagcactttg ggaggctggg |
| | gtaggagggt gcttgagccc |
| 18961 | aggagatcga gaccagcctg agcaacatag tgagaccctg |
| | actctacaga aaataaaaaa |
| 19021 | aaattagcca ggcatggtgg cacactcctg tagtctcagc |
| | tactctggag tctaggaggt |
| 19081 | agaggctaca gtgtgctgtg attgtgccaa tgcaccctag |
| | ccagggtgac agagtgagac |
| 19141 | tctttcctta caaaaataaa aacaagaaag tctgacagag |
| | attgaattgt aattctgtac |
| 19201 | cttactgtac aaccatgggc aagttggcca ggctctctga |
| | gccttggtgc aggtggttag |
| 19261 | agagagtggt ggtcatgccc ctggcaggtc ctccgaaagt |
| | gtctgctctg tgctgttgct |
| 19321 | tttattgcat tgtgaacaga ggagatagtt actacttgta |
| | tctctgcctg gtggtgcaca |
| 19381 | gccaagaata gcagagctgg ctttgactgt aaactactgg |
| | gggtgtgtct aagccgccac |
| 19441 | agatctgaga cagctgcctt gtttctcttt tcacagaaat |
| | tgccccaatg atggccaaga |
| 19501 | caattaaagc tttcaagaac agattctccc gacgataaac |
| | tgaggacttg ccttggaaat |
| 19561 | ggaatctggg gaggcaggaa tacaaggaca gtgggggttg |
| | gggaatggaa ttctacagga |
| 19621 | gactggagtc ttgctttgtg gatccttttg gtctccgagt |
| | cctgcagtct gcaggtgctg |
| 19681 | cccctgggaa cctgcgtgcc acagccccgc ctccctgcct |
| | ggagcacact ttagaattct |
| 19741 | gaagatgtga agcctctgtc tcactgagga ttttaaaggt |
| | caattatact tttgttgttc |
| 19801 | attagcatct ttgtaaacta taagacgtag ttttaattaa |
| | taaatattgc ccccagattg |
| 19861 | tatttatatt atcccccagg tttgtttttg ttttttgtcc |
| | tctaccacac atttagcctt |
| 19921 | ttatcttcca ggtccttatt aaaatcagat gaaagcctag |
| | tgaaagccag tctcctgccc |
| 19981 | cagctcagct ctgtgtggac tctggtccag acagaggact |
| | gggcatctcc agagcctgca |
| 20041 | cagtacctgc tgcacgtagg gcaaggaatg agcactagac |
| | cgcctgtccc caagggagcc |
| 20101 | tcagtggggc gacagggtgc tcggcggact ccacctcagg |
| | ccctccccac tgttgctgtg |
| 20161 | cattcctgtg caggtgcatc tctttcttac taactggtat |
| | ttattaaggg aggtgctctg |
| 20221 | taggtctgga gcctttccct catccttttt gcgagtcccc |
| | acctttttgt tttttttttt |
| 20281 | tNctttgagg ctcactagag gacgcagaac cttgggagat |
| | tgatttgcac agaactcccc |
| 20341 | acctcccact tttacaattt ccagtttctg attgaaaatt |
| | ttagggtttc tccccactgc |
| 20401 | ccttccctat ctttccttcc cctcaacacc atgaaggaaa |
| | aacacacacg gcagggcttt |
| 20461 | ttgtagccct gaaggcaact ttagacattt aaaaKccagc |
| | actttaatct cttgttctct |
| 20521 | gtgaatcact atgagaagtg aatggtttta aaggctgtaa |
| | tgctatgttg gaaattggtt |
| 20581 | tgttttgcct tttattgaaa aggtaagatc atgtgattgg |
| | aagaacacaa ctRttggctt |
| 20641 | gggaagagga ctttgctgYt gaagtgtttt ctaccttctg |
| | agtgtgttta aggcaggatt |
| 20701 | tggagggaag gaccagctta gggagagtgt ctgagccaca |
| | gcgtcaggat gggggaaacc |
| 20761 | acatgggatc catcaagttc cagttgaaca ggagcaagat |
| | cagaacttag gagggcagtg |
| 20821 | tcagctccct tgttggctgt caaggaacac cgatctagta |
| | gaaacccact tggttgtgac |
| 20881 | ccaggtagag gtagatgcca tacatttgag atatgcgtcc |
| | ttaaggaacc tgacaagcag |
| 20941 | actgaaggga tggtaagtgt gacagcctga taagttttct |
| | caaagcccag gatacagagc |
| 21001 | cagtgttttc tgtaactgga gacctcagtt aggccaactt |
| | cgaattccag agcaacgtag |
| 21061 | gaagtctatt cagcagaaac tcgacattgt tcagtgtgta |
| | ttgctgtgca gggtgcctat |
| 21121 | tgtgacagga cacaaatgtt actatgtttt aatttgctat |
| | atttttgaat gggtaaagca |
| 21181 | ttactttact tctcttggtt acttgtacca ccattccacc |
| | cctatcccta gcctgcccca |
| 21241 | caaatctaat attaggaagc ctcttaactg aaaccaaatg |
| | aacatttggg tcaggtgcca |
| 21301 | gatgtctgct gcctagaata gctttttcta ggtgtctacc |
| | accttgaatt tatctcttaa |
| 21361 | ctgtgtgttc aagtctttgt cattgaaact agtttttcat |
| | atcttagatt cagttgtgta |
| 21421 | tgatttaatg tcccttatta ggagtcttta ggcagggagg |
| | gaagaaaaaa cagatttgtt |
| 21481 | catagcaatg tcagtatcca ttttggcaca taaagatttt |
| | tgatgagccc tgtttgcata |
| 21541 | gagccagatg ttttcccctc ccccaagagt atctacatca |
| | gggatgtgac ttggtgcgaa |
| 21601 | gaRtcagggg aaagaggaaa aacccaattt ctaaatgacc |
| | tccttgccca gcttactaaa |
| 21661 | atggctgcag agcagacaca ggatgaattt gaacctgaca |
| | caggatgaat ttgaaccttt |
| 21721 | ggtctcattt atggaaaaac ttgtgcaatt ttttttctgt |
| | gctacactac atacaaatca |
| 21781 | ccaaattaca aattaccctt ttgtgatcct tggtgtactg |
| | agcagtttct ttggggcttt |
| 21841 | ttctttctgg gaagcgggag ggaaaggagc aaggtgtcat |
| | cctgctcttc atttgtattt |
| 21901 | tggtcccaaa atgtaaatac aattttctat gttacttttt |
| | tgtggtaact accgagatga |
| 21961 | atattttaat tagataagtt atatgaaaag gaaaattcca |
| | tgtctaaata aaaaacaaac |
| 22021 | tccatatact gtgtcttcct tacttatagc atcagtggaa |
| | agaagttaga aaatgcctga |
| 22081 | ttcttggact gtttaaggca gagttttttt ttttgttttt |
| | ttttttgaga tggaggaggc |
| 22141 | aatctcagct caccgcaccc tcctaaggca gagatcttaa |
| | tcagcatcct tgggctgggc |
| 22201 | cttaaacgat gccgaattta gtagtaagag gaatttcaga |
| | cggaaagaat tctgtgagca |
| 22261 | aagggcggga actcagcatt tgtggggaac aggcactgtc |
| | ccttattata cttggaaccc |
| 22321 | tggtaacccc atcttaaaat tagaaactgg ttcaaagggg |
| | tgaaatgggg ccgggcatgg |
| 22381 | tggttcatat ctgtaatccc aacactgaag ggcggaggca |
| | ggattgcttg agcccaagag |
| 22441 | ttcaagacca gcctgagcaa catattgaga ccctgtctct |
| | agaaaaagat taaaaattag |
| 22501 | ccaggtgtga tggtgcacct atagtcccag ctatgtgaaa |
| | ggctgaggtg ggaggatcac |
| 22561 | ttgagcttgg gaggtcgagg ctacagtgag ctgtgattat |
| | gctactgcac tccagtctag |
| 22621 | gtgacagagc aagaccagcc tgggcaacat ggcaaaaccc |
| | catctctttt tttgtctcaa |
| 22681 | aaaaaaaaca ggggtagggg gttaggaggg actgtggctc |
| | atgcctgtaa tcccaacact |
| 22741 | ttgggaggcc aaggagggtg gattgctgga gttcaagagt |
| | ttgagaccag ccttggcaac |
| 22801 | atggcaaaac tctatctcta caaaagatac aaaactagct |
| | gggtgtggtg gcacacacct |
| 22861 | ttggtcccag ccactcggga ggtagaggtg ggaggatggc |
| | ttgagcccag gaggttgagg |
| 22921 | ctgcaataag ccatgattgc cactgcagtc cagcatgggc |
| | gacagagcaa gaccctgtct |
| 22981 | ccaaaaaaat aaaaaacaaa cggggagggg ggggaaagga |
| | gtgaaattaa catggccaag |
| 23041 | ttgcgtagct aataaagtgg caaaaggaag gatttgacac |
| | cgtgattctc taactgcaag |
| 23101 | gtttgtgcca ctctgccttt cagtttccac gggctgtgag |
| | ggaccagtag gtctcagctt |
| 23161 | acacgggcgt tctaatgagt acagaaggaa catgaatgca |
| | ggaaagtcgt gccagcaaag |
| 23221 | acttaatgag aacctgctgt ggtggctctg gctgacctgc |
| | aggagcttta gcacttgcta |
| 23281 | atggagccat ggatttggct tcaaccctgc atacagcaag |
| | tggattggac cttccatcaa |
| 23341 | acatacaaat ctgtccttta tcgattaatt aaacatttgc |
| | tgagccagga cctgtattag |
| 23401 | accttaggat atggagtaat agactctgac acttaacagt |
| | tagggaggag taactgactt |
| 23461 | tattgattat gcacctacta ggtgccacca ttccttcttc |
| | tgtacactgc ctctgttatc |
| 23521 | acaatgatcc tgtgaggtaa acagtcatgg ccccatttta |
| | aaaatgacaa cttaatcctg |
| 23581 | gtaaatccag gggattaaaa aataaaaatg agaacttaag |
| | tcaccatagt gtctgtagaa |
| 23641 | ataaatttta aaaaattgtt ttaatgaaaa tgagaaaaac |
| | cgaagcacag agagatgaag |
| 23701 | aacttgccta agttcacaga atcagtgagc agtggtgcta |
| | tgtattggcc tgactccaaa |
| 23761 | acacatgctc tcagtcacat ttaccatctc atacactgac |
| | atgcataccc aatttggcct |
| 23821 | ctgaagcaaa gctgacctcc aaaacaaaag atgcctgagc |
| | caaggccaga gtcgtttctg |
| 23881 | tttttttttt ttaaattctt tttttgtgat ggagtctcgc |
| | tctgttgccc aggctggtgt |
| 23941 | gcagttgcac gatctcggct cactgcagcc tcagcctcgc |
| | gagtagctgg gattacagac |
| 24001 | atgtgccacc acgcccagct aatttttata tttttagtag |
| | agacagggtt tcaccacgtt |
| 24061 | ggccaggctg gtctScaact cccaacctca agccatctgc |
| | ccgctttggc ctcccaaagt |
| 24121 | gctgggatta caggtgtgag ccaccgtgcc cagcctaaaa |
| | attctttatc ctcaagttca |
| 24181 | acagtcattt Ytaagaatga tatcttttgt ctgcttcatg |
| | taactgatgc ccagcagaat |
| 24241 | cctacctggc ttatcaactt gacagatgcc cccatcacag |
| | ggtttctcat ccactttcat |
| 24301 | ctcttcctgg ttatttgcta aatggtgaaa cagtttgtct |
| | tcagaggccc ctgaacttct |
| 24361 | ttctctcact ctttttgaga cagtctcact ctgtcaccca |
| | ggctggagtg cagcggtggg |
| 24421 | atcttggctc actgcagcgt caacctccca ggctcaagta |
| | ttcctcccac ctcagcctcc |
| 24481 | caagtagctg tgactacaga tgtgcaccac cactcccaga |
| | taattttttg gtattttttt |
| 24541 | gggagatgga gttttgccgt gttgcccagg ctggtcttga |
| | actcttgagc ttaatcactc |
| 24601 | taccttggcc tccaaagtgc agggattaca ggcatgaggc |
| | acctcgcccg gccccctgaa |
| 24661 | cttctctatg atgtctattg tctcaactct tttcaaagac |
| | taaggaaagt tccagccatc |
| 24721 | aaaattttat atcactgtat ctgtttctca agcacagagt |
| | cttgggttgg ggcctcagaa |
| 24781 | tatgcattta aaaagatgca actcaagtgt tatggactaa |
| | atgtttgtgt ccccccaaaa |
| 24841 | tgcctatgct gaaatcctaa gacccagtgt gacagtatta |
| | gataggcctt tggaggtaat |
| 24901 | taggtcacgt gggtagaggc ttcatgaata ggattctccc |
| | tcataagaga aatgagagtt |
| 24961 | gctcttgctc cttgttctcc accatgtgag gaaatgagag |
| | gacggcagtY tgcaaaccaa |
| 25021 | gaagagggcc ctcaccagac acagaattgg ccagcgcctt |
| | gatcttggac ttccagcctc |
| 25081 | tggaactgtg agaagtaaat gtttgttgcc taagccagtc |
| | agtYtatggt aagttgttac |
| 25141 | agtaScctga aatgactgag acactaagcg attttttttt |
| | tttttttttt tttttttttt |
| 25201 | tttttttttt tttttttgag gKgaagtctc actctgtcac |
| | ccaggctgga atgcagtagc |
| 25261 | ttgatcactc tcggctcact gcaacctYtg cctcccgggt |
| | tcatgtgatt ctcctgcttc |
| 25321 | agcctcccta gtagctggga ctacaggcgt gcaccaccaa |
| | cttttgtatt tttagtagag |
| 25381 | atgggtttca ccatgttggc taggctggtc ttgaactcct |
| | gacctcaggt gagatcaggt |
| 25441 | gagatccacc tgcctcgacc tcccaaagtg ctgggattac |
| | aggcatgagc cattgtgcct |
| 25501 | ggcctgacac taagcatttt ttttttgggg ggatggagtc |
| | ttgctctgtt ccccagactg |
| 25561 | gagtgcagtg gcgtgatctc agctcactgc aacctccgcc |
| | tcccaggctc aagcgattct |
| 25621 | cctgcctcag tctcccaagt agctgggatt ataggcatgc |
| | atcactacaa cccggctaat |
| 25681 | ttttgtattt ttagtagaga cggggtttca ccatgttggc |
| | caggctagtc ttgaactcct |
| 25741 | gacctcaaat gatccacccg cctctgcctc ccaaagtgct |
| | gggattacag tcatgagcca |
| 25801 | ccacgcccgg ccgacactaa gcaattctta aaatgtacac |
| | tgaagtttga gaactgctcc |
| 25861 | agagaatttg ccacagtgga atagctcttc acagcaggtc |
| | cctaggtcag gactaggaag |
| 25921 | cttgttgatt tagtagtaag caaatacttg cattgcttcc |
| | cactctgtgt cactgactaa |
| 25981 | gtcagacatg gcaggctggg gacagtggct cacagctgta |
| | atcccagcac tttggggggc |
| 26041 | caaggtgaga gattacttga gtccaggagg ttgaaactaR |
| | cctgggcaac atagtgagat |
| 26101 | cttgtctcta aaaaaataaa atattaggcc aggcgcggtg |
| | gctcatgcct gtaatcccag |
| 26161 | cactttggga ggctgaggcg ggcagatcac ctgaggtcag |
| | gagatcaaga ccagcctgac |
| 26221 | caacatggag aaaccccatc tctactaaaa atacaaaatt |
| | agccgggtgt ggtggcacat |
| 26281 | gcctataatc ccagctactc gggaggctga agcaggagaa |
| | taccttgaac ctgggaggtg |
| 26341 | gaggttgaag tgagccaaga tcatgccatt caaaataaaa |
| | taaaaataaa acaaaataaa |
| 26401 | ataaaatatt agttgggcat ggtggcatga acctgtagtt |
| | ctagctactc aggaggctga |
| 26461 | ggtgggagga ttgcttgaac tcggggaggt tgaggctgca |
| | gtgagccaag atcatcccac |
| 26521 | tgcgcaccag cccgggtgaa agagcaagac cctgtYtcaa |
| | aaaagaaaaa agaaaaaaaa |
| 26581 | aaaaaaggcc aggcatggtg gctcatgcct gtaatcccag |
| | cactttggga ggtcaaggca |
| 26641 | gatgaatcac ctgaggccag gagttcgaga ccagcctgac |
| | ccacatggag aaactccgtc |
| 26701 | tttactaaaa atacaaaatt agctgggcgt ggtggtgcat |
| | gcctgtaatc ccagctactt |
| 26761 | gggaggctga ggcaggagaa tcgcttgaac ccaggaggtg |
| | gaggttgcgg tgagccgaaa |
| 26821 | ttgtgccact gcactccagt ctggacaaga gcaaaactcc |
| | gtctcaaaaa aaaaaaaaaa |
| 26881 | aaaaaaagag acatggccct tgccctcatg aagctttcat |
| | ctagtaggga gacagttatc |
| 26941 | aaataactgc acaaataatt cttttttttt tttttttttt |
| | tgagacaaag tcttgctcta |
| 27001 | ttggcaggct ggagtgcagt ggcgcgatct tggctcactg |
| | caacctccgc ttcccggatt |
| 27061 | caagcaattc tcctgcctca ggctcccgag aagctgggac |
| | tacgagtgtg cgccaccatg |
| 27121 | cccagctaat ttctgtattt ttggtagaca cggggtttta |
| | ccatgttggc caggatggtc |
| 27181 | tcgatctctt gacctcgtga tctgcccgcc tcggcctccc |
| | aaagtgctgg gattacaggc |
| 27241 | gtgagccacc gcgcctggct tttttttttt tttttttttt |
| | tttttttgag acggagtctc |
| 27301 | actctgtcac cagggctgga gtgcagtggc gcgatctccg |
| | ctcactgcaa gctccacctc |
| 27361 | ccggttcacg ccattctcct gcctcagcct cccgagtagt |
| | tgggactaca ggctcYcgcc |
| 27421 | accacgctcg gStaattttt tgtattttta gtagagacgg |
| | agtttcaccg tgttagccag |
| 27481 | gatggtcttg atctcctgac ctcgtgatcc acccacctcg |
| | gcctccaaga gtgctgggat |
| 27541 | tacaggcgtg agccacggcg cccggccaca aataattctt |
| | taaagtacag gtttctgggc |
| 27601 | cctactgaag aaatatggtt gaataggtca aaggtaggat |
| | ctggaaacag gtacgctttt |
| 27661 | gtaggcttcc cccaatgaac tcgatgagcg gcctggtttg |
| | ggaatgtcta gtgtagtgga |
| 27721 | aaaagcatgc atgacctttg ggatgagacc caggttcaaa |
| | tcctgcctcc accactccca |
| 27781 | cacctctctg agcctcagtt tcctcattgg taaaatggga |
| | attatgacac tctgcaggaa |
| 27841 | ttcttataag gattcaatga cagaagggga gccacatttt |
| | agtgtccctc cttctttccc |
| 27901 | tctaaatgtg gaatgaaaga aaaaggtttt gttttttact |
| | gatgggaatt caaacttcag |
| 27961 | ggtcacaagc taagaactat tttgaggtca acaagtcctt |
| | cctgataaat gaaatcttag |
| 28021 | tgcctgcttc ctcagagtta gtttgacttt tctgttttgg |
| | ggccccattc taattttttc |
| 28081 | gggtccctta aactgcagct tctaacaacc actaaaaagg |
| | aagaccacct aatttcttac |
| 28141 | ggccacaaac tcaaatacca ggggtttggt atgtgacagc |
| | aggctgtgat gggaacagaa |
| 28201 | agaaaatgga gctattcaca cagctccact ttattgcttc |
| | cgggttgaag acagggccca |
| 28261 | gtgttgccac ctcttctgga tttaaagaaa atggccggcc |
| | aggtgcggtg gctcatgcct |
| 28321 | gtaatcccag aactttggag gtgaggcagg tggatcactt |
| | gaggtcagga gtttgtgacc |
| 28381 | agcctgccaa catggtgaaa ctccgtctct accaaaatat |
| | acaaaaatta gccaggtgtg |
| 28441 | gtggcgtatg cctgcagtcc cagctacttg ggaggctgag |
| | gtgggaaaat ctcttgaacc |
| 28501 | tgggaagcaa agtttgcact gagtgacaaa gctccagcct |
| | gggtgacaaa gtgagaccct |
| 28561 | gtctcaaaaa aaaaaaaaaa aaaaaaaagg aaaaaggaat |
| | aggctcagca gtagttctca |
| 28621 | actagaggtg actttgttcc cagtatgaca cttggcaaca |
| | tctggagaca ttttggttgt |
| 28681 | cgctgttgtt ggggagctat gggcatctag tgggcagagg |
| | ccacggatgc tgctatccat |
| 28741 | gctacaatgc acaagacagc gcccctcccc caacaaagaa |
| | ttatctggcc gaaaatgtaa |
| 28801 | atagagccaa ggttgagaag ccttggacat ggttctgttg |
| | cagcaacaac cctcaaatct |
| 28861 | cagtggcttg caacaacaga ggtctcaccg cctgtccatt |
| | gtgagtctga cagggatctg |
| 28921 | ctttatgtca tcctcactca ggggcccagg ctaagggagg |
| | tgccattccc atgcttgtaa |
| 28981 | gatcttcgag gcaagtagag aatattaata tattattaac |
| | attaattata ataataaaaa |
| 29041 | ataatattaa ttacaatatt gatataactg ttaagttttg |
| | tctagaagtg acatctatca |
| 29101 | ttgccatcat attgcattgg ctgcacctta attcatgggg |
| | tcaaggaagc acaatccatc |
| 29161 | catgttcctg gatgcagaga attgggaata tttgctaaca |
| | gcattaaaga ttccaaaggt |
| 29221 | tgggtgcacc aaaacctcag agatcaccac taaagaactt |
| | attcatgtaa ccaaacacca |
| 29281 | cctgttcccc caaaacttat tggaaaaaac taaaaatcca |
| | gagaaaaatg tatgctgacc |
| 29341 | aaaaaaaaca aaaaaacctc caaaggtaat catgacagcc |
| | tgggctctag gtaatccaca |
| 29401 | aggctcagag aagggcagct aagggcacag gctgtggagt |
| | cagacgtcag acttggcttc |
| 29461 | aaaccccaca ctttctagcc atgtggactt gagcatgtca |
| | cttaatctct cagtttcttt |
| 29521 | ctctaaaaat gaggaaaata ggctgggcgt ggtggctcac |
| | acctgtaatc ccagcacttt |
| 29581 | gggaggccca ggcaggcgga tcacgaggtc aggagctcga |
| | gaccagcctg gccaatatgg |
| 29641 | tgaaacccgg tatctactaa aaatacaaaa attaggccag |
| | acgtggtggc ccacgcttgt |
| 29701 | aatcccagca ctttgggagg tcaaggaagg cgggtcacga |
| | ggtcaggagt tcgagaccag |
| 29761 | cctgaccatc atggtgaaac cctgtcttta ttaaaaatac |
| | aaaaattagc caggtgtggt |
| 29821 | ggtgtgagcc tgtaattcca Rttactcagg aggaagaggc |
| | aggagaattg cttgaacctg |
| 29881 | gaaggtggaa gtcgcagtga gccgagatta cgccactgca |
| | ctccagccta ggtgacagag |
| 29941 | tgagactcca tctcMcaaaa aaaaaaaaaa aaaaaaaagt |
| | ctgggtgctg tggctcacgc |
| 30001 | ctgtaatccc agcactttgg gaggccaagg tgggcggatc |
| | acgaggtcag gagatcaaga |
| 30061 | ccatctctac taaccctgtc tctaataaaa atacaaaaaa |
| | ttagctgggc gtggtggtgg |
| 30121 | gcacctgtgg tcccagctac tcgggaggct gaggcaggaR |
| | aatggcgtga acccgggaga |
| 30181 | tggagcttgc agtgagccga gatcatgcca ctgcactcta |
| | gcctgggcga cagagtgaga |
| 30241 | ctctgtctca aaaaaaaaaa attaattaat taaaataata |
| | ataataataa ttaSctgggt |
| 30301 | atggtggtgt gcgcctgtag tcccaggtac tcaggaggct |
| | gaagcagaag aatcacttga |
| 30361 | acccaggagg tggaggttgc agtgagctga gattgtgcca |
| | ctgcactcag cctgggtgac |
| 30421 | agagcgaggc tccatctcaa aaaaaaaaaa aaaaaaaaaa |
| | acaagggaaa ataaatcaac |
| 30481 | cttgcagtgt taaaatgctt agaacagtgc ctggcacaca |
| | gaaacagctc aggacatgtt |
| 30541 | agccaggatg atgatgatga tggattaggc caggcgccaa |
| | tcacggagtg ggcatttagt |
| 30601 | aaacagttgt tgttataacc taagctctga ggaaaatgac |
| | ttgtccaagg taacacagct |
| 30661 | ggtaagtgca gcatggtgga gaagagccta agctctgggg |
| | tctcagcctg gcacatcgta |
| 30721 | aatcataaat attaaataat atttggagga ggttcagtgt |
| | ggttaagaac atggactcag |
| 30781 | gccaggcacg gtggctcaca cctgtaatcc tagcactttg |
| | ggagcctgag gcgggcagat |
| 30841 | cacgaggtca ggagatcgag accatcctgg ctgacacggc |
| | gaaaccccgt ctctactaaa |
| 30901 | aatagaaaaa attagcccgg cgtggtggcg ggtgcctgta |
| | gtcccagcta ctctggaggc |
| 30961 | tgacgcagga gaatggcgtg aacccgggag gcggagcttg |
| | cagtgagctg agatcgcgcc |
| 31021 | actgcactcc agcctgggSg acagagcgag actctgcctc |
| | aaaaaaaaaa aaaaaagaac |
| 31081 | atagactcgg tagctcacac ctataatccc agcattttgg |
| | gaggctaaca ggggcgcatc |
| 31141 | ctttgatccc aggagtttga gaccagcctc ggcaacatgg |
| | caaaactccg tctctacaaa |
| 31201 | atatacaaaa attagccagg catggtgatg tgtgcctgta |
| | gtcccagcta ctcaagaggc |
| 31261 | tgaggcagga ggatcactta agcctggggg tgtcaaggct |
| | gcagtgagct gagatcacga |
| 31321 | cactgcactc cagtctgcgt ggcagagcaa gaccttgtct |
| | caaaaaataa ataaataaaa |
| 31381 | ataacatgaa ctcccgaggc tgactgccgg gttcaaatcc |
| | tagctctact actgaccacc |
| 31441 | tgtatgaact tgagcaagta actcagcctc tctgtgccca |
| | gttttctcat ctataaaatg |
| 31501 | aagctaataa taaaacacct gcaattagga aaattaaaaa |
| | ataacattag taaagccctc |
| 31561 | gggacccata tggttgttag ctgctacagt attactatgc |
| | cctcagttcg ccacaaagaa |
| 31621 | gcattcaaaa gtaacagaaa ataattaaca gtatcatttc |
| | acccacccaa ttgagatagg |
| 31681 | agagaagaaa atggatacaa attcagcaat ccttgagcta |
| | agaaaatgtt tacagccagg |
| 31741 | ggtggtcgct caggcctcta gtcccagcag ttagggaggc |
| | tgaggccagc agatcacttg |
| 31801 | agtccaggat ttcgagacca gcctaggcaa tgtgatgaaa |
| | ctccatctct acaaaaaata |
| 31861 | caaaaattac ctgggcatgg tggcatgcac ctgtagtccc |
| | agctactcag gaggctgaag |
| 31921 | tgggaggact ggttgagccc aggaggcaga agttgcagtg |
| | agccaagact gtgccactgc |
| 31981 | actccagcct gggtggcaga gtgagaccct atctccaaaa |
| | aaaaaaaaaa gtttataaat |
| 32041 | ggagcaatgg gaaaaaactt ggatgctttt Yttacctgcc |
| | ccagggtagt cctagaaatc |
| 32101 | agtgagaatt cccatttgtc ctcagagatt cctgcaacat |
| | aggagtgcaa gagaggagac |
| 32161 | agtaagcaga ggcacaaggc attactccca aatcacagct |
| | aagccaccct gcaaccctgg |
| 32221 | ccggctcctt acaaacccag ctcccttagc aactgcagtt |
| | tcccatccaa ccagacgagg |
| 32281 | gcgccgagct gacagtcttg ctgctggcaa tagtgatagc |
| | cgctgtgaaa gcacagtaga |
| 32341 | tgctcgtcca cttgtcgagg agaatgctga attcttacca |
| | cttttgcacc actgtaaagt |
| 32401 | cacaaagtca taagtcgaac caccataaac tggggattat |
| | ccgcagtccc cccttatctg |
| 32461 | tgggcgatat gttccaagac cctcagggga tgactgaaat |
| | agtactgaac gctatatata |
| 32521 | cagtactatg cttttttcta tacatacata cctatgatta |
| | catttaattt ataaattagg |
| 32581 | cacgatgaga ttaaacaact aataataaaa tggaacaatt |
| | atagcaatat gatgtaatac |
| 32641 | agttatcagg cactgtgctc ataacttttg cagtttcatg |
| | tgtggcagca aaactagcag |
| 32701 | gtatttcttt ttccttcttc ataatttcac agatagaaga |
| | ttcgttctta ctacagatct |
| 32761 | tagcgacctc agcacacttt attttttctt tccttattat |
| | aacttttacc ttttcattta |
| 32821 | aagaaagaac tttatggctt ctctttgcca tatccaaatt |
| | gctagcatga Ctactcttgc |
| 32881 | actttggggc cattattaag tcaaataagg gtgacttgaa |
| | cacaagcatt gcaatatcac |
| 32941 | ggcagtcgat ccgataacga acagggcact tacttagtaa |
| | gtgactaacg aacagggagt |
| 33001 | gtatacagcg tggaggcact agacaaaggg acgattcagg |
| | ttccccaggt ggacagagcg |
| 33061 | ggacagcaca agacttcatc acgctactca ggacagcatg |
| | caatttaaaa tttacagatg |
| 33121 | gtttatttct gaaaatttcc atttaatatt tttggacagt |
| | ggttgactgc atgtaactga |
| 33181 | aaccacagaa agcaaaaccg agtcaggggc aggggagggg |
| | ggcggctaca gtaatagcct |
| 33241 | ttccctgtgg accagatgtt ataccaaaca ctttcatgtg |
| | ttatttcaca ttactgtcat |
| 33301 | agcactccac aacataggta ctgttatgat tcccatttta |
| | tgtaagacaa atctgaggcc |
| 33361 | tagaaaaata aataaataaa aagaaaaaag aaaaaaatct |
| | gagacctaga gaggttaagc |
| 33421 | aatttgccta gcaggccaaa cctaatattt gcaggacagg |
| | agcaagaata cagctgaatg |
| 33481 | catacttaaa aagttataaa tgaccctaat gaactattaa |
| | ataaaagaca atctattctg |
| 33541 | ctatgtcaat aaataaacct tcacaatgac ctggaagacc |
| | acattcacat ttttgggcct |
| 33601 | ctcagagttc tgtactagaa ggtggtgaga ggcagagaac |
| | aggacoctag ccctgcccca |
| 33661 | ttctctccat atctctaaat ctgtgtgcct ggaagggYct |
| | tgtgtccacg catgcagagg |
| 33721 | tcctaacctg tgtgctcaca ctttgttcta ggggttctaa |
| | attgaaaagg tccctcaggt |
| 33781 | atccagcaca atgaatgaca aaagagacca aagcacaaca |
| | aaaatcatca cattctagaa |
| 33841 | taccaagaga agatcttaaa agcttccaga aaacggggtg |
| | gggtgggggg aaaacccata |
| 33901 | aaaagaatca ggattcagaa cagcattgta tttatcaaag |
| | ccagaagaaa accagagcaa |
| 33961 | tttcttcaca attatgaaag aattctatcc acagccaaac |
| | tactaattaa gtacagtaga |
| 34021 | ataaagccat tttcagtgcc acttaacatg tatggcagca |
| | tggtagccag ccactaaggt |
| 34081 | ggcctctaat gatttctacc tcctggtatc tgcactctta |
| | tgaagttccc gcacacactg |
| 34141 | aatatggctg acctgtgaaa ccatgggatg ttgcaaaatt |
| | gacaatatgg gacttctgtg |
| 34201 | gctaggtcat aaaagacatt ggtggtttct accttgccct |
| | tagatcactt gttctgctga |
| 34261 | aaaccagctg ctgtatcatg aggacactca aacagtacta |
| | ttgagaggtc catgtgttaa |
| 34321 | ggaactgggg cctcctgcca agagcctgca caaacttgcc |
| | agccggggct tctccagccc |
| 34381 | tggccaagcc ttcatatgat ttcaggctca tgagagaccc |
| | caagccagaa ccacccagct |
| 34441 | aggacgctct caaattccta actcacagaa actgtgagat |
| | gataaatgtt aattgttgtt |
| 34501 | ttgaggagag aggccatttc tcttactgtc tctgaagaga |
| | aggaagaagt aaaagctgaa |
| 34561 | aaacaacagg aatgaagtca gtggcaagac caactgatgc |
| | cacttaccag gcctgaggtt |
| 34621 | aaagattaac gcccccaccc taaccacatg tgttacctat |
| | agatcacttg ctcaatctat |
| 34681 | cacaaccctt tcacgtggac ccccttagag ttataagccc |
| | ttaaaagggc caggaacttt |
| 34741 | ttctttggag agcttggttc ttgagacaca actctgccaa |
| | cgctcctggc cgaataaagt |
| 34801 | ctcttccttc tttaacctgg tgtctgacag gttttatctg |
| | cagcttgtcc tgctacagtt |
| 34861 | ttaagccatt aagtttggga ataatttgtt acacaacaaa |
| | agacaactaa tacagaccta |
| 34921 | ctgggagggg aggagccaca gtattttgca gttcttccaa |
| | tcaggaggtg aagtctacag |
| 34981 | tctagctctc cactctagaa tttggatttg gctgatgggt |
| | cattatagaa agattataga |
| 35041 | tgtaaggctt aaaaagtgct tgtgctggca gggcgcagtg |
| | gctcatgcct gtaatcctag |
| 35101 | cactttggga ggccgaggtg ggcagatcac ctgaggtcag |
| | aagtttgaga ccagcctgcc |
| 35161 | caacatggtg aaaccccatc tctactaaaa atacaaaaat |
| | tagccaggcg tggtggcagg |
| 35221 | cgcctgtaat cccagctact cggaaggctg aggcaggaga |
| | atcgcttgaa cccgggaggg |
| 35281 | ggaggttgca gtgagcggag attgtgccac tgcactccag |
| | cttaggtgac agagcaagac |
| 35341 | tccatctcaa aaaaaaaaaa aaaaaaaaaa gtgcttgtgc |
| | aattgagtct tgccctctct |
| 35401 | tgctcctggg aactctgcaa ttatcaccat gtaatttagc |
| | taggcttgtc tgctggagac |
| 35461 | acgtggtccc atcatcccag ctaacagcca gcatcaagca |
| | gacgagagtg agaccatccc |
| 35521 | aaactttcca gcccaagctg aactggccca gaaaMgctaa |
| | tccacaggat catgcgaatt |
| 35581 | aatcaatgtt tgttgtttaa agctatcaaa gttttagggt |
| | aatctgttac acagcataag |
| 35641 | ctaattgata cagcatattt actttgtgtg cacctcccgc |
| | ctcaacctcc ccaccctaac |
| 35701 | caggaaacta ctgatgtgtt acaagaacac tacaggatgt |
| | gttcaaagcc tggttacctc |
| 35761 | ctaactttac ctagtctcag acaagttagt ttgcctcttt |
| | cagcctcagt tttcctcatc |
| 35821 | ttcaaattgg agataacagt aggtaatagc acctagctct |
| | cttttttttt tttttgagat |
| 35881 | ggagtctcgc tctgtcgctc aggctggagt gcagtggcac |
| | aatctcggct cactgcaacc |
| 35941 | tctgcctcct gggttcaagc gattctcctg cctcagcctc |
| | ccgagtagct gggattacag |
| 36001 | gcacacgcta cgatgcctgg ctaatttttc tatttttagt |
| | agagacgggg tttcaccatg |
| 36061 | ctggccaggc tggtctcaaa ctcctgacct caagtgatct |
| | acccgcctcg gcctcccaaa |
| 36121 | gtgttacagg tgtgagccac cacacctggc tgtacctagc |
| | tcttaaagtt catgtgacaa |
| 36181 | ttaattgaga tgaactacat aatgtgctta gcacacagtg |
| | ctcaaataaa tcattaatga |
| 36241 | aggcaacagg aaaaagccaa aatgagtaga tctccggggt |
| | aaggcctgag ttggttcttc |
| 36301 | aaaaggacac tcttaccaaa gaaaggctac caagtatatc |
| | agtcaagtaa acatttactg |
| 36361 | tttgccacat tccaggtccc ttacctgaaa ctgtgaccta |
| | aaagcaggaa taattcacgg |
| 36421 | cactgagcta ttttgaaaca gaaccaagct tgcttattgc |
| | acaagtaact aaaataggac |
| 36481 | atcaaaatat ttttcttgtt tttatttttt tgagacagtc |
| | ttgctctgac acccaggttg |
| 36541 | gagtgcagtg gtatgattac agctcactac agcctcaccc |
| | tcccaggctc aggagatcct |
| 36601 | tccacttcag cctcccaaat agctgggacc acaggcatga |
| | gccaccatgc tgggctaRta |
| 36661 | tttttaatta tttttgtaaa gatggggtct ccctatgttg |
| | cccaggctag tctcaaactc |
| 36721 | ctgggctcaa gtgatcctcc caccttggcc tcccaaaagt |
| | gctgagatta caggcatgag |
| 36781 | gcactgcatg tggcccagaa aatatttctg aatggaactt |
| | gaaaaaatgg atattttggt |
| 36841 | ctatacttca ccagccccac tgagcactcc agagccagat |
| | gtgaagggaa gagggtagcc |
| 36901 | agggtatccc ataactctct ttctgtatcc tgtcttttcc |
| | ccaccaggga gtaggaaaac |
| 36961 | attctatcct gaaaacaaga ttatttcacc tctaaacagt |
| | gacttttaat tattttgatc |
| 37021 | tcaacccaca atatgaaaaa cacatcatat tgtgtctgaa |
| | tacaaactca aaactgaaac |
| 37081 | aaaagtttca tcaattgaga cttgaaatgt gtgatacatt |
| | ctgggttttt ttttttttgt |
| 37141 | attctatttt ttttttaaat gttgatcaca attctctata |
| | aacggatttt aaaacctatt |
| 37201 | gacaggccac aaccagctgt tcgaaaaaaa gtactttgaa |
| | atatcacatg ggggaggaaa |
| 37261 | cgcagagatc atctagtcca atcccttcac ttcacagggg |
| | gtaaactgag tctcagaaga |
| 37321 | tcaagtcact tgcccaaggc cacgcagcta gtaagttgct |
| | gtggttggat ttgaccgtaa |
| 37381 | taaccatcgg ctactgaatg cccatcatgt gtcagccatt |
| | tgctgagttt tttctttttt |
| 37441 | tttctttttg agacagagtc ttgctctgtc gccaggctgg |
| | agtgcagtgg cgcgatgtcg |
| 37501 | gctcactgca acctctgcct cccgggttca agcgattctc |
| | ctgcttcagc ctcccgagta |
| 37561 | gctgggacta caggctcgcg ccaccacgcc tagctaattt |
| | ttgtattttt agtagagacg |
| 37621 | gggtttcatc atgttggcta ggatggtctc gatcttttga |
| | cctcgtgatc cgcccgcctc |
| 37681 | ggcctcccaa agtgctggga ttacaggcgt gagccaccgS |
| | gcccggcctg ctgagttctt |
| 37741 | taattgcatt atttcattta atactcactg tgatcctatg |
| | aaacagatac tattctttcc |
| 37801 | accttacaga cggggaaacg gagtctcaga ataggggaaa |
| | tgacttaagg tgtcacaatg |
| 37861 | gccagtagca gacccaggag tagtctttag gtctggccgt |
| | gcacaaagcc ccatgctctc |
| 37921 | aagctgtaac cccgctatca agaaagtggt tatgcaagtg |
| | ggcctgtgag ctctcaacgt |
| 37981 | ctaagccgtg cgcatgtgag acagcgataa gctcgcgttc |
| | tccagtctcc agggccttat |
| 38041 | cattcctcac gctttccttc atcggctcgc aaagaaacgt |
| | ggcgatcaag gaagacagcg |
| 38101 | aaggctccat cctcgtcggg ggaggataat tcgaatctca |
| | gcctgtgagt ttactcagca |
| 38161 | cacctgttta atctcttggt ccttcagttt ccacacctag |
| | gaagctggaa cagcagcagc |
| 38221 | atccagcgcc aggactggag tcatatacga actctggcac |
| | ctgggaggcg cgcgtcctac |
| 38281 | gtcagttccg ctcgacccca cccYccccgc ccccccgcct |
| | tctccccacg cgcatgcgcc |
| 38341 | gcgcagcggc gctttttacg acgcggcagg cgcggcgcgc |
| | ttagttgccg gagctgaacg |
| 38401 | gcgcggagct ggtctgaggc gagccgagcc gagcgagcgc |
| | ggcggtgggg ccgagaggac |
| 38461 | gcgcaggtgg cggcgttgcc atgtcgcacg gtcacagcca |
| | cggcgggggt ggctgccgct |
| 38521 | gcgccgccga acgggaggag ccgcccgagc agcgcggcct |
| | ggcctacggc ctgtacctgc |
| 38581 | gcatcgacct ggagcggctg caatgcctta acgagagccg |
| | cgagggcagc ggccgcggcg |
| 38641 | tcttcaagcc gtgggaggag cggaccgacc gctccaaggt |
| | gggccgcctg gggcttgggg |
| 38701 | cgggcggggc agggtgcgtg tggggcctcg ggccgtcggt |
| | ctactcattt ctgatgttaa |
| 38761 | gaataacgac agcctggttg ccaagcgctt ttccgtgcct |
| | gtctcctgcc agctctttgg |
| 38821 | gaggcgagca gcgttgtctc cccattttgc atatagggaa |
| | actgaggcct agagggaacg |
| 38881 | gggacagttt tgtcaagcta cacagcctaa cgctctattc |
| | cagggctgtg tgggctagag |
| 38941 | aggatggtcg tgagggccgt tggaccattg gtgctaatgg |
| | ctgcctcatc atattacctg |
| 39001 | gtgaagaYga gcctagggag atgaaaggtg gttcccatat |
| | agagcaaatg ttctttacat |
| 39061 | tgtggggtcg caggcccctt tgctatctgt ttgaaagcag |
| | tggaccttct tctcagaaaa |
| 39121 | atgcacataa acacctgcct ttcagttcac acttcagaag |
| | gctcttcgac cctggaaatt |
| 39181 | cattcatggg ctttttgtta agaaccttcc agttgggtgg |
| | cctgtggctg ttatgacact |
| 39241 | ggataagact ggttagcttc aagttaataa gtcttggaaa |
| | accaagggag agtgactctt |
| 39301 | cccattgcac cccagttgta gagcagggtg ggagatgcct |
| | gaaattgtag gctctcagca |
| 39361 | aatatttgtt gctttctcct cccccctccc catcccctcc |
| | agtttgttga aagtgatgca |
| 39421 | gatgaagagc ttctgtttaa tattccgtaa gtatctcctt |
| | ggtgcctacc tcaggctaaa |
| 39481 | taggctgtac ccagttgcct cagatggatt cattcactgg |
| | tgtcaagagc acacatttgc |
| 39541 | ttctagaaat gggataaatt actttggtgg gtttgaggag |
| | gaaagcatca tagctttctt |
| 39601 | ggtgcagact ggaaacagat gtatttgtag aacaataact |
| | gagaaattga ggtagatttc |
| 39661 | ttagaattgt agaatgctag aggtagacag gatcttagaa |
| | attatctagt acaagttgac |
| 39721 | agatgagtaa actgaagccc atacagggga agggtcttgc |
| | ccagggtcac acaactaaac |
| 39781 | aggtattcaa actcaggttt gacaaccttc tcttttgcat |
| | tctggcagat ttacgggcaa |
| 39841 | tgtcaagctc aaaggcatca ttataatggg agaggatgat |
| | gactcacacc cctctgagat |
| 39901 | gagactgtaa gtggcaaagg cttaggccct caaaggagct |
| | cctaattctc tttttctggt |
| 39961 | aacattttat tccagaatag tatcNtttNc ttcttaccgg |
| | gtttaatatt tcccctttta |
| 40021 | aaatatcttg gtcctgttct cattctgcat tggaatacat |
| | atatttcttc ctgaattaat |
| 40081 | gactttttta gattaagcat ctttaggccc aacagcgtgt |
| | ctcatatttc aaagtgctta |
| 40141 | ctatgacatg attcattcag agagcattgt gtaaatgtca |
| | cttgttgatg actctgcagt |
| 40201 | tttcttaata actagctgca gatctcatat gatctttatg |
| | gattctaggg gttagcttca |
| 40261 | acatttttcc ttgctatttc atacagtaat gatcttatgt |
| | gttttgttga catggaattg |
| 40321 | ctccacctga ctttgcgtgg catttagtta gcaaagttgt |
| | gtatacctct tgcaacactg |
| 40381 | aatcttttgc caccagagct agtacccttt ttgacaactt |
| | accttattcc agaacagcct |
| 40441 | tcctaaaaga aggggaaaac tgctttctga gtgctggaga |
| | aacatataag aagaacttta |
| 40501 | catttaaaaa attcagtccg ggtgcagtag cttatctcac |
| | aaaaccaata aaagatgata |
| 40561 | tataggctgg gcacagtggc ttacacttgt aatcccagca |
| | ctttgggagg ctgaggcggg |
| 40621 | cggatcacct gaggttcgag accagcctgg ccaacctggt |
| | aaaaccccgt ctctactaaa |
| 40681 | aaWacaaaaa ttagctgggc ctggtggtgc gtgcctgtaa |
| | tcccagctac tagggagggt |
| 40741 | gaggcaggag aattgcttga acctgggagg cggaggttgc |
| | agcgagccga gatctcgCca |
| 40801 | ctgcactcca gcctggatga cagaatgaga ccccatctca |
| | aaagtaataa taaaaacaaa |
| 40861 | taaataaaaa attcaaatcc taaaggccga gcatggtggt |
| | tcacacctgt aatcccagca |
| 40921 | ctttgggatg ccgagactgg ttaggagttc aagaccagcc |
| | tgaccaagat gctgaaaccc |
| 40981 | cgtctctact aaaaatacaa aaattagccg ggcatggtgg |
| | cacacgcctg taatcccagc |
| 41041 | tacttgggag gctgaggcag gagaatcgct tgaacccagg |
| | tggcagaggt tgcagtgagc |
| 41101 | caggatcgtg ccactgcact ccagtctggg tgacagagca |
| | agactccatc tcaaaagaaa |
| 41161 | aaaataattc aaatcccagc actttgggag gccgaggcgg |
| | gcggatcact tgaggccagg |
| 41221 | agttcaagat catcctggtc aacatggcga aaccctgtct |
| | ctactaaaaa tacaaaaatt |
| 41281 | agctgggtgc ggtggcacag gcctgtaatc ctagctactg |
| | gagaagctga agcatgagaa |
| 41341 | tcacttgaac cgcggaggtg caggttgcag tgagccaaga |
| | ttgcaccact gcattccagc |
| 41401 | ctgggcaaca gagtgagact ctgtctcaaa aaaaaaaaaa |
| | aaaattcatc tgaaaaattg |
| 41461 | attaaaggac ttccagagat ttaagatata ttatagttga |
| | gtattagaaa catgaatttg |
| 41521 | aaagcaaatc catgtattta atcattttaa ggaaataata |
| | cctttgatgc ttttggagac |
| 41581 | tcatttactt ggaagttgat ggactgacct gagaatatta |
| | ggcatccatg ctgcattgtg |
| 41641 | atttagagtg tgggatctgg agtaaactgg gttcaaataa |
| | tggctgtacc acttgttagc |
| 41701 | ttcatgactt tgagacctta tcttctctat gcctggattt |
| | tctatatcta acatgggaat |
| 41761 | ggtaacagtg catacatacc tcataagatt gtggagaggc |
| | ttaaatgaga taaaacatgt |
| 41821 | aaagagctta gattaggtct ggaacacagt aagtgtccaa |
| | ttttgggtga acagatacga |
| 41881 | atacatagcc ctcagttcta agcacactac atatattata |
| | ctttatcaaa tgtaagatgt |
| 41941 | cattgattgt aaaatgtacc attatattca attaatacag |
| | aaaaaatgct attgaactat |
| 42001 | gacatgtcat tgacacatcc agaaaaatta gattgagagt |
| | attaaatcag ggaagtttga |
| 42061 | acacagatga ggtgttacat gttactaaag aattaccatt |
| | cagccaggcg cagtggctta |
| 42121 | cacctataat cccagcactt tgggaagccg aggcaggYgg |
| | attacctgag gtcaggagtt |
| 42181 | caagaccagc ctggccaaca tggtgaaacc ctgtctctac |
| | taaaaacaca agaattagcc |
| 42241 | agtcatggtg gcagtcgcct gtcatcccag ctattcggga |
| | ggctgaggca ggagaatcac |
| 42301 | ttgaacccgg gaggcggagg ttgcagtgag ccaagattac |
| | tccactgcac tccaacatgt |
| 42361 | gtgacagtgc aagactctgt ctcaaaagaa aaaaaaaaaa |
| | gaattaccac tgggctgggc |
| 42421 | acagtggctc atgcctcaat cccagcactt tggggaggcc |
| | gaggcgaaag gatcacttga |
| 42481 | gcctaggaat taaaggttat ggtgaattaa gatcgtaaga |
| | tcatatactg gaccccagcc |
| 42541 | tgggcaacag agcaaggctt aaaaaaaaat tatttatata |
| | gtttgagata gggccttact |
| 42601 | ttgtcaccta ggctggagtg cagtagtgtg atcatagctc |
| | actgcagcct cgacctcctc |
| 42661 | agttcaagca atcctcccac cgcagcctcc caagcagctg |
| | ggaatacaga cgtgtgccac |
| 42721 | cacgcccagc taatttatgt atttttttgc agagatgggg |
| | ttttgttatg ttgcccaggc |
| 42781 | tggtcttgaa ctcctgggat caagcaggct gcccacctca |
| | gcctcccagt gtgctgagat |
| 42841 | tacaggagct agccactgca cccagccaaa aaaaaattta |
| | aaaaagtgaa ttgctgttaa |
| 42901 | ttttgttatc tgttgatatt gtcaattatt gtaaaatggt |
| | attaaatata tgtattttat |
| 42961 | tttattttat tttatttttg agacagagtc tcactgtgtc |
| | gcccaggctg gagtgcagtg |
| 43021 | gcgcgatctc ggctcactgc aagctccgcc tcctgggttc |
| | acgccattct cccatctcag |
| 43081 | cctcctgagt agcggggact acaggtgccc gccaccatgt |
| | ctggctaatt ttttgtattt |
| 43141 | tttagtagag atagagtttc actgtgttag caaggatggt |
| | ctcgatctcc tgaccttgtg |
| 43201 | atccacccac ctcagcctcc cgaagtgctg ggatcacagg |
| | cacatgtgtg tatatatata |
| 43261 | tgtatatcta catatatacg catatatata tacacatata |
| | tgtgtatata tacatatata |
| 43321 | cgcatatata tatacacata tatgtgtata tatacatata |
| | tacgcatata tacacatata |
| 43381 | tatgcgtata tatacgtgtg tgtgtgtgtg tgtgtgtgta |
| | ttttttgttt ttttaagacg |
| 43441 | gcgttctgct ctgttgccta ggcttgagtg cagtggccca |
| | atcttggctc actgcaacct |
| 43501 | ccgcctcctg gggtcaagcg attctcttgc ttcagcctcc |
| | tgagtagctg ggattacagg |
| 43561 | tacacaccac caggcctggc taattttttt tttattttta |
| | gtagagacag ggtttcgcca |
| 43621 | tgttgaccag gcagctctcg aactcctgac ctcaagtgat |
| | ccgcctgcct ccgcctccca |
| 43681 | aagtgctggg attacaggcg tgagccacca cgcctggccc |
| | atactggaat atttataggt |
| 43741 | gaaatgatgt gtctgggatt gctttaaaat attgagctta |
| | agcaaaatca ggctgatagg |
| 43801 | caagatcaac aaaatgttga tcatcgaaga tgagtgaaaa |
| | gtatgtggag attcattatg |
| 43861 | taatctctgc ttttgtgtaa gtttgaactt ttccatagta |
| | aagttttttc aatatatgcg |
| 43921 | ttacttagaa tcgattcaat ttcatctcca taccaaccgt |
| | gtggaatatg tactattacc |
| 43981 | attcccattt tacagatgag gaaacagagg ttaaatcagg |
| | tgcccaaatt tactcagctg |
| 44041 | gtaagtgaca gagccaggct tgaatcctag aaagtctagc |
| | tctagatttt aactacagcg |
| 44101 | ctatactgct tctcattatg ccgctcataa atgtttacta |
| | ttattattat tctgtggtgc |
| 44161 | atcattctta gaaacacttt gaagtaaaca tttgctttct |
| | tttttttttt tttttttttt |
| 44221 | tttgagacgg agtctcgctc tgttgcccag gctggagtgc |
| | agtggcgcca tctcggctca |
| 44281 | ctccaagttc cgcttcccag gttcatgcca ttctcctgcc |
| | tcagcctccc aagtagctgg |
| 44341 | gactacaggc gcctgccacc acgcccggSt aattttttgt |
| | atttttagta gagacggggt |
| 44401 | ttcaccgtgt tagccaggat ggtctccatc tcctgacctc |
| | atgatctgcc cgcctcggcc |
| 44461 | tcccaaagtg ctgggattac aggtgtgagc cactgcgccc |
| | ggSggctttc ttaaattaca |
| 44521 | tgcattttgc cccagctaat atcgaggcct cttctgtgtg |
| | ggtgtgtcaa taaaacaccc |
| 44581 | tggaattggt ggggacatgt ggcttagtct ttgggaattt |
| | gtgggttata gagacagctg |
| 44641 | ctttttagat tactctttga aaaacatttt cttctctagc |
| | agtttacttt ttatttattc |
| 44701 | tgagacagag tctctctgtc acccaggctg gagtacagtg |
| | gcgtgatctt ggctcattgc |
| 44761 | accctctcta gcggtttgga tgtgagattg cagtcttttg |
| | tgatctttca aaatggaaat |
| 44821 | cctcatgtta taaatgtttt aagaactgta aggtgactga |
| | gtgtatggcg tggtttttgg |
| 44881 | acacaaaaaa atgcttgagc attgggttac ctgatctttt |
| | atctcttaac tgtgtgtaat |
| 44941 | atgtttctgc caaagtatgt atttttccca tgagtaagct |
| | gttttattta ataacatcct |
| 45001 | cagtttggtc tgaatgtgct gagttgttta ttttctccat |
| | gcatttgctg catgtgacct |
| 45061 | agtttgagcc gtctctttgt gtattgcttc tcatgtgata |
| | ttaacccact caaagatgcc |
| 45121 | atggggttat gttgcagatc tcagctcttt ttttgttgga |
| | ttaaagatat ttgtaggcta |
| 45181 | gacgcggtgg ctcatgcctg taattccagc actttcggag |
| | accgacgtag gcggatcacc |
| 45241 | tgaggttggg agttagagac cagcattgcc aacatggtga |
| | aaccctgtct ttactaaaag |
| 45301 | taccaaaatt tgccgggcat ggtggcgtac gcctgtagtc |
| | ccagctactc aggaggctga |
| 45361 | ggcatgagag tcacttgaac cYgggaggtg gaggttgcag |
| | tgagctgaga ttgtaccatt |
| 45421 | gcactccagc ctgggtgaca cagtgagact ctgtctcaaa |
| | aaaaaaaaaa aaaaagatat |
| 45481 | ttggagatac ttgtataaaa tgtcatttct aaaatatgac |
| | ccccaaattc agtctcctat |
| 45541 | tgatagaacc aaagccattt aagcagtcag tagaaaattt |
| | tgaaaacctg aaacgtgata |
| 45601 | atgcacattt cttgactttt ctttcctttc ctttctcagg |
| | tacaagaata ttccacagat |
| 45661 | gtcctttgat gatacagaaa gggagccaga tcagaccttt |
| | agtctgaacc gggatcttac |
| 45721 | aggagaatta gagtatgcta caaagtaagc actgggcctg |
| | tcttccattc tctatggctt |
| 45781 | cttatagggc ttgccattta tttttggcca gtctcctgct |
| | ctcttagcat tggaaatgag |
| 45841 | ttaaaacagt ggaggagact tgatctttgg cttggtcagt |
| | ttttggcaga gattcagtgc |
| 45901 | aagccacaga cttgttaact tgcaagcaat tggcagatct |
| | gaatgaactc ctagggtggt |
| 45961 | tttaggaaag atgtgtctcc cattagttta ggttaacact |
| | aaatgtgctt tagaatccct |
| 46021 | gctgggttat gcagcatttc tcattcctgt tccttgaggg |
| | caggagcagt gtttatccct |
| 46081 | actgccttgg acaggatctg gcaggtgctc agtaaatggt |
| | cattgaatta attgcctgtc |
| 46141 | caaaggagaa ggaagaactc aggagctctg Mctttgcctg |
| | gcttttacaa gctggagctg |
| 46201 | aattgttgtt tcacatggtg gtgagatact cattgaacta |
| | taattcatac cttctttccc |
| 46261 | tattcctgtc atcctctaga atttctcgtt tttcaaatgt |
| | ctatcatctc tcaattcata |
| 46321 | tttcaaaaaa cttcggagca gatacgacaa aggtctttta |
| | tattggcctg agaggagagt |
| 46381 | ggactgaggt aagatggggt tggaaaggtt ttcccctcat |
| | gtctacatat ctgcacactg |
| 46441 | tggtgatggg agcttccagg gaagggaaaa gagcaagtgt |
| | cataattact cccagtttat |
| 46501 | tatttttctt ggttttatca gtataaactt ttcgtctcat |
| | ttgagaaact acaggtattt |
| 46561 | ttaagggggt tgaaactgtt atttttatat aaataatata |
| | tataatatat atatatatat |
| 46621 | ctcagctcac tgcgacctcc gcctcccagg ttcaagtgat |
| | tctcctgcct cagcccccca |
| 46681 | agtagctggg attacaggtg cocactocca cgcctggcta |
| | atttttttgt atttttagta |
| 46741 | gagacagggt ttcaccatgt tggccaggct ggtctcgaac |
| | tcctgacctc aggtgatctg |
| 46801 | cccatctcag cctcccaaaa tgttgggatt acaggtgtga |
| | gccaccttgc ccagcctgaa |
| 46861 | attgtcattt atattaattc acagttttct actttcaaat |
| | gctttcattg agtatttttg |
| 46921 | ataatctttt ctattcatga accagggata agataatacc |
| | atagacaagt tcctattctc |
| 46981 | atggtacccc cattatagta gggagactga atcttcaaag |
| | ttacagggtg aatcaatgat |
| 47041 | aatgatcttt gcagctttct ggagttaaaa agtatcaaaa |
| | ttgggagata ttagatgatg |
| 47101 | acatctaagt attaaaataa ggagatatta aatgatgact |
| | cctagaaatg aacctgaata |
| 47161 | aggactaccg caatgtgtgt ggtgtgggaa aggacagttc |
| | ttttaatggc tggctgaccc |
| 47221 | agcctcaatt ttcttgcagc ttcgccgaca cgaggtgacc |
| | atctgcaatt acgaaKcatc |
| 47281 | tgccaaccca gcagaccaYa gggtccatca ggttacccca |
| | cagacacact ttatttccta |
| 47341 | agggctggcc aaggctccca tagaggcgct gtgtcagtga |
| | agatgtacga ctacctgttg |
| 47401 | ggaaggacaa agggatgagg ctccagagag agttggctgc |
| | cacagcctct gccaagcttt |
| 47461 | gtctttgggg cttgctgcag aaacctggcc tacggaagat |
| | acgacaccac tgggagggtt |
| 47521 | gtgtaggtgc caggggacca tcgtggttct ctagggcgct |
| | gtggaaattg ggtcttgggc |
| 47581 | tgggtggcat ctggcagtca tggRtaacac ttgcttttcc |
| | agttaatgtg gccatgtgat |
| 47641 | tccaagtgtc atgttgcttt gtggcaagat tgttgtgtga |
| | cttgtttttt tgtttttgtt |
| 47701 | tttgtttttt taaaggaaac tatttgtggg ctataggaaa |
| | ctttctgatg cctccggatt |
| 47761 | gtgttagtag tagccatcag gagggtctcc aactaaaaca |
| | cttgttcctg cttgctcctt |
| 47821 | tcccctctca ttgttcagca ttcttgtcaa gttgcccagc |
| | ttggagttgt ctgtcacgca |
| 47881 | catgtgtcct gtggttatag ctagaaggac aggagtctcc |
| | tgctgatgcg tgatagctta |
| 47941 | agcttgggga gaaggtcttt tccactgcct agctaagcag |
| | tctggggaga gcatggggat |
| 48001 | catttctatg tgtgtgggta atctggtcag taagattgag |
| | acttagttaa gattcccctt |
| 48061 | ggaaattcct taatgtttat tagcttctaa ctagtgttgt |
| | aagtccgatg ccagaatttg |
| 48121 | gagatttgag ttcttctttt catggctttt attcactgtg |
| | actaataagc ttcctaataa |
| 48181 | atccttgcca gacttaatgt ttgtattttc ttttgagttc |
| | ttgatagcca ctgatgcaac |
| 48241 | tttcatttca tggggaactg tactgaactt tgaaattttt |
| | tgttgttgtt ttggactagg |
| 48301 | tagattatag gaagtgccac aattaaatca agactggagc |
| | cgggcgcggt ggctcacgcc |
| 48361 | tgtaatccca gcactttggg aggccgaggt gggcggatca |
| | cgaggtcagg agatcgagac |
| 48421 | cacggtgaaa ccgtctctac caaaaataca aaaaattagc |
| | cRggtgcggt ggcgggagcc |
| 48481 | tgtagtccca gctactcagg aggctgaggc aggagaatgg |
| | catgaacccg ggaagcggag |
| 48541 | cttgcagtga cctgagattg caccactgca ctccagcctg |
| | ggtgacagag tgagactccg |
| 48601 | tctcaaaaaa aaaaaaaaaa aaaatcaaga ctggatcagt |
| | ttctccagga atggtcaagc |
| 48661 | ttaattttgt acagtaggcc aaaaacactc ctacacccat |
| | atatagtaaa gaagaaggtg |
| 48721 | gggttgaaaa cctgtatttc acagaaatta actgggcatg |
| | gtggcgtgca cctgtagtcc |
| 48781 | cagccacttg ggaggctgag gtgggaggat cactggagcc |
| | caggaggtcg aggctacagt |
| 48841 | aagccatgat tgcgccactg caccccagcc tgaggcaaca |
| | gagtgagacc ttgtctcaaa |
| 48901 | acaacaacaa caaaacccta tatttcattt tgcacaaaag |
| | gaagtgattt gtagaatgac |
| 48961 | atttacaaaa ataagggaga acagattttg gagctcatca |
| | gaagaaatga gggtgaggaa |
| 49021 | agtaattgag cagctcatgt ggtctccagg tagaccaaag |
| | actttggact taaattttga |
| 49081 | aagtcagttt agcaattgaa gagaatgtaa gtatctaaaa |
| | aggggatttg atatggtcag |
| 49141 | tattctctcc cttgcagaaa acaggaacag gtaataaagg |
| | gaattagtgt tgaatctgat |
| 49201 | ccttttggga gaattcctct gaggcattgg cccatgctgt |
| | tgtttggagg atatagccac |
| 49261 | tgtttctcca gcctgtccta ggaaaggtct gotaccacca |
| | aaccttgttg gccctcaaaa |
| 49321 | tttctaaaat gcagcctgaa ataaaccaga atgcaaatgc |
| | tgttcttgaa aagcatgaag |
| 49381 | ggtcctattc actcagccac agcctcttta tttcagttgg |
| | atcatttttt ggagttaaaa |
| 49441 | gaagggctat gtttaaattt ggagtagggg gaaaaataaa |
| | gttaaaaatc ttagagcaga |
| 49501 | ctagcccttc actaattcca ctaattaaag cattaatcac |
| | agctcctggg actgagcctc |
| 49561 | tgaatttgaa gcttcactct gaagaatttg ttttaagtgt |
| | catggtgtct caggtgatcg |
| 49621 | aggttgcagg aggaactgtt cattcttcca taagtgggga |
| | cattaccctc cattttcttt |
| 49681 | tgacattcag tcctgggtcc ttggcttgtg gtggtcccat |
| | aggctcaaag gtttcctgcc |
| 49741 | ccgaatcctg gtattgtagg ctccctgacc tgttgagtac |
| | ttaggaccaa agtgcctctg |
| 49801 | ggcctggggg aaagtgcttt gttgagcttc caactttgta |
| | ctgttttctt tttcttttct |
| 49861 | ttcttttttt tttttttttt tttttgagac agagtctcgc |
| | tttgttgccc aggctggagt |
| 49921 | gtagtggcac tatcttggct cactgcaagc tccgcctccc |
| | gggttcacgc cattctcctg |
| 49981 | cctcagcctc cccccgagta gctaggacta caggcgcccg |
| | ccacagcgcc aggctaattt |
| 50041 | tttgtatttt tagtagagac agggtttcac cgtgttagcc |
| | aggatggtct cgatctcctg |
| 50101 | acctcgtgat ccgcccgcct cagcctccca aagtgctggg |
| | attacaggag tgagccaccg |
| 50161 | cgcctggctg tactgttttc tttctgttca aagaaaacac |
| | tagtataggt taggctggga |
| 50221 | gagtgagtcc taagcggctg agggtcaagt gtgactcatt |
| | tcctatttgc agatccccac |
| 50281 | acattctcag ggacatgctc cttcaactca gtttgcctgc |
| | cttctgactt ttctgtggtc |
| 50341 | cctgatacct atttccactt cagcttgatg gcagcgtttt |
| | gtgcactgtc tgcatgacat |
| 50401 | tgcttgtgaa gggcagcgct aacactgcca gtgcctgtcc |
| | agctctcctg atacggcctt |
| 50461 | tgtatttttc ctaggtcctt ttttgcgtga ttaacacctc |
| | acgctgtgat tttactgtat |
| 50521 | aaaccatgtt cacacaacct catttaagcc taccaacaaa |
| | gctgtgaagg aggcagggtg |
| 50581 | gttattacca ttttatatat caggaagcag atccagagag |
| | gcagaattta aatggaatcc |
| 50641 | cgaggttgct gtttacatgc cttccttgag cctcagtttc |
| | cccatcttca aggctggaga |
| 50701 | actagatgat ctgtaaggtc tcttcggttc agagtgtgtc |
| | attccattca tgatcctgga |
| 50761 | atagggcatg aaagccagtg gcagaMaccc gaggccttaa |
| | gaggtgtgtc ccatgaggat |
| 50821 | gggaaggtgg taaagtttat gcaaacaata gtgtgaggga |
| | tgcctctcct tccggtcggc |
| 50881 | cctcctccag gaggcgcatg ggtggtggta gcaagtggga |
| | gtcttgggtg ccctgtctcg |
| 50941 | aatctacaag gtgggagcgg gtgagaaccc agcgactgcg |
| | cggctgaatg acagggagta |
| 51001 | gccccgccgc ctccaacatg gcagcttcta tccagcgaag |
| | ccgggtcccc gcttccKggt |
| 51061 | tccgtactgt cggccaggct acttccggca gcgcgatggc |
| | tgggttcccg ggactcgaac |
| 51121 | ggaagttccg gcgggggcgg ccgaggggga agagtgtgtc |
| | tgcgggagaa agaggagaat |
| 51181 | cgcccaagcg gcctcggaag tcccagggag tggaggtacc |
| | cagccggcgg CtgCggagga |
| 51241 | tgggcgtgta gggggaggtc ggcctcggga gggtcccgga |
| | gagcggggag ggggaaccgt |
| 51301 | gatggggggR atgggggtgg ggagtgaggt gcgaaggcgc |
| | tgtccagtct tggggacttc |
| 51361 | gggagtggag cggggctagg caagggggtg tctgagtata |
| | aagagacaga cttcagggtc |
| 51421 | ggaaatagaa gagcccattg tggggcgggg gcttccccag |
| | agtcaaaggt acaaagcttt |
| 51481 | attgtgggca ggtgggagtc ctgggtcagg gtagaaaatt |
| | tcactgggta gggtgacctt |
| 51541 | tggtcagaac agaagttccc attgtgggga gcgggagatc |
| | ctgggtcagg gtggaagttc |
| 51601 | tcaaggtgta tagagagaga caggtcaggg ggaaggcacc |
| | cctccgagga gggagcctgg |
| 51661 | gcgggaggtg caagtcccca cggtggagaa ggaagggaat |
| | cgcagctcag ggcaggaggt |
| 51721 | gcattcccca tgggaagagg aaccccgggt cacaggtgaa |
| | cgatcccatt gtggggagct |
| 51781 | gccctcaggg gtcagagatg gaaggtgagg ccagttggga |
| | ggggtgggca ggcacttgag |
| 51841 | gcaggtagtg gaagcttccg gcgagtttgg aggacgccga |
| | ggatggggag gggccagcca |
| 51901 | gcctgacatt cttttgtgtg tttgggagtc ccagagcgtg |
| | gtcaagccag ggctcgtttg |
| 51961 | cagtcagtgg cagcagcagc aggtagctcc gtttaNgggg |
| | ggcgtggagc accagtttgg |
| 52021 | gggtgggtgg agttcttacg ctttctgggg acatgggcag |
| | ccccctgggg gtctgggaat |
| 52081 | ggatgggcca gaaactgctg tgaaggctgg atgggggctg |
| | ggtgggggga ggttgagatg |
| 52141 | ggggttggag gcggcactga gtaggggatg gaagctcctt |
| | tccctggcac ttttctctcc |
| 52201 | atttcccata gggcccggag ttggggaggc agggacccag |
| | ggatgattgg agaggagggg |
| 52261 | gaaggcactc acccctgagg agttagaggg ggaatgaagc |
| | aggcgtgccg ctgcctcccc |
| 52321 | tctgccccct gccctacagt ccctatgccc tgcctctgcc |
| | tgtctccagc aagctcaggt |
| 52381 | cctgtggttg ggccagaacc agagacacat gttctgggcc |
| | actagggagg ctgtctctgc |
| 52441 | ctttcagccc tggaactgag gcagacttct tctcctgtgc |
| | cctgggactt cttgcttgac |
| 52501 | tattctttgt gcccaggaca gaacctgggt gctgtgtggg |
| | gctgaKggcc tggtggcctc |
| 52561 | ttgggccagg agtgtgtcct gtgcctggtt ttgctcttga |
| | cYgccgcccc gatgtatgca |
| 52621 | ggcccccgcc gtggagccgt gtggtgtatg tgtggtaaca |
| | ccatgtctgt gcccctgctc |
| 52681 | accgatgctg ccaccgtgtc tggagctgag cgggaaacgg |
| | ccgcRgtaag ggtccccttt |
| 52741 | cacccacggc cagacactgt gggagcagct ggaggaccgg |
| | ctggaggggg tgtgggaaaa |
| 52801 | tggaggtggc agtgatgagc agggagtatc ctgaggccag |
| | caggctcggg gtagtaaMct |
| 52861 | gtttggctgc tacctgggtt cccccaggtc cttgggggtg |
| | ggggaggggt gggcagaagt |
| 52921 | tggaggacct agggKaagcc ttcctgtYtc cccatttccc |
| | atccttttcc aggttatttt |
| 52981 | tttacatgga cttggagaca cagggtaagt gactgaggag |
| | gggtgctcct taaggagggg |
| 53041 | tcctggccca gcagcggact ggagaggcct tctcttccta |
| | ccacatcgga gccttttctc |
| 53101 | cYgtccctcc tacaggcaca gctgggctga cgccctctcc |
| | accatccggc tccctcacgt |
| 53161 | caagtacatc tgtccccatg cgtgagtgtc accccagcaa |
| | gggaggggct gaggctgggg |
| 53221 | atcatctggg ggtggtcctg tcatcccagg cctgttctct |
| | cctgtcagtt gcatcctggg |
| 53281 | gcttgggctc agggcagtca gaagtggcat tttcagcctg |
| | agctcctgtg gagcccccag |
| 53341 | gagtggggtc cagcaccagc ccccagccct agggcctcct |
| | agacctgagc tctcctagaa |
| 53401 | cccacacctc cctttgcccc ttccccaagt actcaccgac |
| | tacctgggac cccgtcacac |
| 53461 | caagcgctgg gctctgcttc tccattactg gcgctttgcc |
| | ccaaccacag cctccagccc |
| 53521 | cacgtggcag gttgcctggc aacaccttaa acacaggccc |
| | tgcctgctgg gaggggccac |
| 53581 | caggggcggc gcggccccac tccgggctct gagctctggc |
| | ctcctcattc ctcctgagca |
| 53641 | tgatgggccc tctggctctc tttccccagg cctaggatcc |
| | ctgtgaccct caacatgaag |
| 53701 | atggtgatgc cctcctggtg agtttgggag tgggggtggg |
| | cagggggacg aggacacttg |
| 53761 | ggctgaggga gccacagggg gctggctggg gttttctata |
| | gctgccagtg cctctactcc |
| 53821 | caaggtttga cctgatgggg ctgagtccag atgccccaga |
| | ggacgaggct ggcatcaaga |
| 53881 | aggcagcaga gaacagtaag accccagccc ctcctccaca |
| | tcctccttcc cctgcccccc |
| 53941 | aggaaagcgc tgggcggttc ctcagcctag ctcccttatt |
| | gggccccttg gcagcttccc |
| 54001 | tctacccact catgccccct cccccagtca aggccttgat |
| | tgagcatgaa atgaagaacg |
| 54061 | ggatccctgc caatcgaatc gtcctgggag gcttttcaca |
| | ggtgagggga gaggggtggg |
| 54121 | ggggtagggg gtaggggtgg ccggtgagtg agctgtgccM |
| | tcatgacccc tctctctcct |
| 54181 | ccctccaggg cggggccctg tccctctaca cggccctcac |
| | ctgcccccac cctctggctg |
| 54241 | gcatcgtggc gttgagctgc tggctgcctc tgcaccgggc |
| | cttcccccag gtgaatgtcc |
| 54301 | ccactgaccc ccccgccctt tgtgtctgca tcctcgtggc |
| | ttggggactg ctgcagcact |
| 54361 | agctttgccc tgagtcctgt ccggcctcca ggcagctaat |
| | ggcagtgcca aggacctggc |
| 54421 | catactccag tgccatgggg agctggaccc catggtgccc |
| | gtacggtttg gggccctgac |
| 54481 | ggctgagaag ctccggtctg ttgtcacacc tgccagggtc |
| | cagttcaaga catacccggg |
| 54541 | tgtcatgcac agctcctgtc ctcaggtcag tggggggacc |
| | atttcccact cccacttctc |
| 54601 | tgcctccagc caggtgcctc tcgtgatccc ctcttaatcc |
| | cctcaggaga tggcagctgt |
| 54661 | gaaggaattt cttgagaagc tgctgcctcc tgtctaacta |
| | gtcgctggcc ccagtgcagt |
| 54721 | accccagctc atgggggact cagcaagcaa gcgtggcacc |
| | atcttggatc tgagccggtc |
| 54781 | gagcccctgt cccYaccYtt cctgacctgt ccttttccca |
| | caggcctctg ggggcaggtg |
| 54841 | gcaaggcctg gcYgggcctt ccttcctggc cttagccacc |
| | tggctctgtc tgcagcaggg |
| 54901 | gcaggctgct ttcttatcca tttccctgga ggcgggcccc |
| | cctggcagca gtattggagg |
| 54961 | ggctacaggc agctggagaa aggggcccag ccgctgaccc |
| | actcactcag gacctcactc |
| 55021 | actagccccg ctttgggccc cctcctgtga cctcagggtt |
| | tggcccatgg ggccccccca |
| 55081 | ggcccctgcc ccaactgatt ctgcccagat aatcgtgtct |
| | cctgcctcca ctcagctgct |
| 55141 | tctcagtcat gaatgtggcc atggccccgg ggtccccttg |
| | ctgctgtggg ctccctgtcc |
| 55201 | ctgggcagga gtgctggtga ggaggtggag ccttttgagg |
| | ggggccttcc ctcagctgtt |
| 55261 | tccccacact ggggggctgg gccctgcctc cccgttaccc |
| | tccttccctg caggcctgga |
| 55321 | gcctgtaggg ctggactgag gttcaggtct ccccccagct |
| | gtctcacccc cactttgtcc |
| 55381 | ccactctaga gcagggaggc agtgggggag gagttgtgtc |
| | tYgtcttctg tctccatgtg |
| 55441 | gtttttgggt gtttttcttS ttgtgtcctg gattccgata |
| | aaattaaaga aattgcttcc |
| 55501 | tcaacgctca ggcctggctg attctattcc aggggtggat |
| | agtgaccatc tgtgagaacc |
| 55561 | tgccccagtg taagaaaact tgtttttatt tttaaatact |
| | ttggaaagct ctttcagagc |
| 55621 | aatataaatg agtgcctggg aggaKgaggt tttgtgccaR |
| | agccttgccc cctcactcac |
| 55681 | tcttgggggt cctgatgaac tcttggaccc tgtggaagat |
| | aagagttaRa gacctMggcc |
| 55741 | tcctggtcag tggagccctt ggcctcatgc ctggtgggct |
| | aagcgggccc agctggggtt |
| 55801 | tgaggtaggg gaggccttgg Yttggcccca gcagctccag |
| | ggccctgagt tcctgccaga |
| 55861 | ggctggagag caggcagctg ctgcttttcc tggtccttgg |
| | taggggaggg tcctcaggct |
| 55921 | tgcgtgccaa agcctgaagg attctgcttc tgccagcgcc |
| | agagatcctM acctgcaaca |
| 55981 | cggcgaggtg tgtgctcagg gcccacggtg gaatgcagag |
| | cctcccccac cccacagccc |
| 56041 | gccctgggtg ggcatgccca gatctgattt agcccctccc |
| | tggcccctaa ctgcaggggt |
| 56101 | caggccagca ctcacacatc ctgtccagcc ctaaggctgc |
| | tgtccacccM agctcctctt |
| 56161 | gggccaRgct Kgggttggcg taacaggctg ccacatcacc |
| | ttcccgccgK gcMaccacct |
| 56221 | tgtacgggat ctgcaagaca ggaggtagtt ggagcttaKc |
| | tgagccggcc ctggcccagc |
| 56281 | tgctggccag gtctttaaga agcagaagtg cagagcagcg |
| | gctggcccgc aggcaccggg |
| 56341 | tgctaggcag gctgaggaga ctgggcagtg ccaggtaccc |
| | tccagagagg tgagtgggaa |
| 56401 | gggccaaagc tgctctgttg ctgagagctg ggtggggtga |
| | ggtgggtgag gtgggtgggg |
| 56461 | Ygggggggcc taccttcttY ccagaRgcct tctccataRc |
| | ctggaccatY tgcagcactg |
| 56521 | aatagcctgt gcccgtgccc agKttgtaga tctggcccac |
| | ggagaacagg gtttatggag |
| 56581 | cgggctggac tgaccacgcc tctgggccgc tctgcctgga |
| | tctggtccct cccctccctc |
| 56641 | acttctccct tctcttccta cccggcagcc acactgttct |
| | ttcagcttcc ttaaggctgc |
| 56701 | aatgtggccc ttggccagat ccacgacatg gatgtaatcc |
| | cggacacctg cagagaaggg |
| 56761 | agtgtgttgg atggggagtc tgttccccct gactctcctt |
| | cctggctccc actcctaggt |
| 56821 | ccccctSgtc ctaggctcac ctgtgScatc ctctgtgtMa |
| | tagtcattgS caaagacatt |
| 56881 | cagggcctcM cgtcgcccga tcgccaMctg gaggtggaga |
| | tcaggtcagt tcgtcccaga |
| 56941 | tcccaggcac cagctttaac cccagggcca ctcctctgtc |
| | ccttcccttt tgccttacct |
| 57001 | gggagacata aggcatgagg ttgttgggta tgccctgggg |
| | atcctcacca atgcagccag |
| 57061 | aggcatgggc acctgtgggg ttgaaatagc gcagcagcac |
| | tgcgttccaa gtctgtggga |
| 57121 | tgtgggtcag gtggtgaggc cagaggcaca ggcagcgtgt |
| | cccagctgaa cccagagccc |
| 57181 | tcctcatgcc tattctgttt ttttgagatg gagtctcact |
| | atggcccagg ctggagtgta |
| 57241 | gtggcctgat ttggctcact tcaacctctg ccttccaggt |
| | tcaagcaatt cttgtgcctc |
| 57301 | agcctcccga atagctggga ccacaggcac acaccaccat |
| | ggccggctaa tgtttgtatt |
| 57361 | tttagtagag atgggggttt taccatgttg tccaggctgg |
| | tcttgaactc ctgacctcag |
| 57421 | gtgatctgcc cacctgggcc tcccaaagtg ctgagattac |
| | aggtatgagc cactgcgccc |
| 57481 | ggccagttgt ctatttatta tctttagaaa caagcagggg |
| | atggggccct ccactgcaac |
| 57541 | tgcctgagcc ttagcttcct ccttagtggg ggtgttcgga |
| | atcccacccc tgggctcagg |
| 57601 | gtgggccctg aggagtccat cgatcagtgg agccagggca |
| | ctgtcaaggg ggccctcacc |
| 57661 | ttgtctgcct ggcacaggtc ccggatcatt tcctcgatga |
| | agaacttgga cttgccgtaa |
| 57721 | gggttggtac aaccacccgt ggggtgggcc tcatcaaggg |
| | gcaggtRctg ggggttcccg |
| 57781 | tacacagtgg ctgagctgct gaacaccagg ttcttcaccc |
| | cgtgggcctt catgatctgg |
| 57841 | ccgtggagag atggcatcag tgacctctgc ctcacacatt |
| | actcccaccc tgttactcct |
| 57901 | ccacaggaga atggggctga ggtgatgagc actctcattt |
| | acagatgggg aaactgagac |
| 57961 | tgggaggtaa agacatgagt ccaggatgat acagcttggg |
| | ctctgtgttt ggcactgcct |
| 58021 | gccaggctgg ggtccagctg gacaccctcc tagtgtctgt |
| | gccctgtccc atgcctctca |
| 58081 | cctccagaag ctggatggtc ccggtcaggt taactctgta |
| | ataatccaga ggcttctgca |
| 58141 | ccgactcgcc cacggccttg agccccgcaa agtggatgac |
| | cgccataaag ctgtactgca |
| 58201 | ggggtgacat ggccagaggt tgctctactg gttttagtcc |
| | ttggcaatgc cctcagcctg |
| 58261 | cctgcctgca ctcacctttt tttttttttt tgacagtctc |
| | gctctgttgt ccaggctgga |
| 58321 | gtacagtggt gccatctcag ctcaccgcaa cctccacctc |
| | ccaggctcaa gccatcctcc |
| 58381 | catgccagcc tcccgagtag ctgggaccac aggtatgggc |
| | taccatgccc agctaatttt |
| 58441 | tgtatttttc tgtagagatg gggtttcact gtgttgagca |
| | ggctggtctt gaacacctgg |
| 58501 | gctcaagtga tctcctcacc tcggccttcc aaagtgctgg |
| | aattacaggc gtgagccacc |
| 58561 | gtgcccagcc tgcacccacc tttttgaaga gacgctgtag |
| | ggctccctgg tccaaaatgt |
| 58621 | ccatctcctc aaactccaca gagcggcctg tcagctcctg |
| | gacccgccgc aggctctcag |
| 58681 | gcagggagcc ccctcctggt agggtacatg taggccacat |
| | catcacgaca tggggtgctg |
| 58741 | tgttcccagg gactagccag acacacattc cccScccggt |
| | ggtggaggtg gaacccaggg |
| 58801 | ttttgcttct gccatcccct caagtagccc cagccccact |
| | gccccgctca ccacggaagg |
| 58861 | cattatggaa gttatcgatg accacaggca agtagccagc |
| | ctccagcagc tccagcaccg |
| 58921 | tgtggctgcc aatgtagcca gccccacctg ttaccagcac |
| | cttctctgcc atggcacctg |
| 58981 | gcccaggata cagagtctca gaggtggctg aggctgcctg |
| | ctcagagctt ccttcccact |
| 59041 | ggaatcctgc cccctaagct cgctttggaa ggaggcggca |
| | gtgtgcccta ggtaccagac |
| 59101 | tggctcagaa gtcagccctg gggcaagtct gggtaccatc |
| | actttctggc cttaggcttt |
| 59161 | ggaaattaat tagcctcttg gcctcagttt ctatctctgt |
| | aaaacagagc taataattgt |
| 59221 | ataaacttca tgaggcagcg tgagggttca gtgaggtgat |
| | cttaagggcc cgccacagca |
| 59281 | gagctgggga gacctgacac acaggcacct tattttctag |
| | ttccacttgc cttggagttg |
| 59341 | gaaaagatgg aatctgagga tccacacttc tttgtccaag |
| | gtgactgagg actggagagt |
| 59401 | cctgggcaga aggaaaatgg cagcacgatt gggactccag |
| | ggtYgcagga aRgggttctg |
| 59461 | tctgctcaga cccaggcttg tccaatgcct ccgccttcgc |
| | taggtgtaaa ctggctcctg |
| 59521 | ggcgcagtga ctaatacctc ctgctctagg cggcccccac |
| | cccctttccc tcaagggtca |
| 59581 | gctgggagga agcaggaaat agatcacatg gcctcaaggg |
| | tgaggtcctt tgccaggcag |
| 59641 | gctgaggcca gctcaggggc aaccacaccg tggttggtcc |
| | tggagggggc cccaccccaa |
| 59701 | cccccgctca gcctctgccc atgccagggc cagcccggtc |
| | actcctggct caRagttagg |
| 59761 | aatcccgccc aacttaggct actctgggtg ggccgtgtag |
| | acgtggactt ggccaggtgc |
| 59821 | gcacctccac cctgaacaaa ctctgcgggt agtacgggga |
| | ggaagcccca gacactgagg |
| 59881 | cctttcattc ccagcgaccg ggcccgctgc cgccttcctc |
| | cacgctgcct ctatcccctt |
| 59941 | ctgggctcac gcagctccaa cccacttgac caagagccct |
| | ctgcgtgcca ggctccgtac |
| 60001 | caggcacttt tgcatgattt tcctgaattc ccccagcatc |
| | tcggtgagac aggtgttatc |
| 60061 | actggcactt tacagataca gatactaggg ccagagaggt |
| | gaaacagttg cccttcggtc |
| 60121 | ccacagctgg cgacagcggg ctggaatctg gatcgccagg |
| | ctcgcagccc ggccctctcc |
| 60181 | ccaggcggct cgcccttccc ccaccgctgc ccgctggact |
| | ctgcccgccg cgccgaagcc |
| 60241 | gcccccgccc ccgccccgcg cctggcgcgg accccgaaag |
| | tggtcgcaga gaggccctgg |
| 60301 | gaagcacgaa agctggtctg aggccggctg cgcccccgac |
| | agcggagtga ccttgctcag |
| 60361 | ccgtcgccca ctcggttttc ccagtctgtc tgttggaggg |
| | aaggggagct aggccgtggg |
| 60421 | catacgaggg cggctgggtc tcaggctggg ctttgggctg |
| | tagcgcggag cggggccgag |
| 60481 | ctaggagtcc tcaggccggc aatgaatgaa ccccggccgc |
| | cccagcccgg gcagcgggga |
| 60541 | actgggacaa agggggcggg cctgccctgg agggacgctg |
| | ccaggaacac gacccgcccc |
| 60601 | tcggaaactc cctcgctccc cgcggactcc ccggcccctc |
| | gcgagcccac ccggcccttc |
| 60661 | attccgtctc ccgaacctgc tcgggttccc gcgccccacg |
| | cttgctgcag aggcaccgcc |
| 60721 | tcctacgccc gagccgcggg ccctttaagt gctgacggcc |
| | cactcMggcc ccgaccccgc |
| 60781 | ccctccacgc ccccaaggaa acatgtcact cgggttacgg |
| | ccactacggg gagggcggga |
| 60841 | ggacaaaagg cctccgcgct gtgacgaaga ctgcgcagcg |
| | cgcgcccgcg gaaggcggaa |
| 60901 | gtgggcggtg ccaccccgcg agaggcgccg ccggcgccag |
| | gtcccagtag cgggtgggtc |
| 60961 | cttgccggtg ccccgggtcc ccgcgctagc tcgtcccaac |
| | ccctggaaga gggctgcgct |
| 61021 | tccgaggggg cagggggcag agggtagggg gcccacgcct |
| | ccgccccact ctgacccgca |
| 61081 | ggttttcaga cttgccggtg tgtgccaaac catgaattca |
| | aaatcttgaa ctacScgatc |
| 61141 | ccacgggact aaggcaggag ggggtcgcag ggggcctggt |
| | gctggaagtc cagtttgcaa |
| 61201 | ataaaccaag gagctggagg aagctgtcag gccacactag |
| | cggttccagc gctcttggct |
| 61261 | ctcagccccc acctgccggg aagggtcggt ctgcactctg |
| | ccttccacga cggcaggtta |
| 61321 | gaaaatgatt gtttgtttMc aatgaaaagt agtagagcta |
| | gagaataata tgcacaaaat |
| 61381 | gtgacatcct gcgtgatgaa accagagcaa aggagcccta |
| | aatgcaggag cgcacaggtg |
| 61441 | tccgcgcagc cgggaatcag ccagcgcctg cccgcagagt |
| | ccagggaacc gacaggtgag |
| 61501 | cgctcccggg cccgggagcg ccagggagag gccgggccac |
| | cgaggcccaa agcagcaagt |
| 61561 | gtgtcctcag gggagcttgt gcaatagccc cagtcacaga |
| | ggcaaagctc agaaacaacc |
| 61621 | ccgtcgggtg ttctggccag caactgccgc aagcagcctc |
| | ctgagtaagc ccaaaaccac |
| 61681 | tgatttccag tcactatgga tttggggctc aggtggggaa |
| | acagggagga aatccaaaga |
| 61741 | ttaataaact agttcatagt ctccattttc ctctcagagt |
| | gcaacatggt aaagtatttt |
| 61801 | actcccccac gcgcatgtat acacacagct gcacaaccga |
| | atgctggaat tatgatgtgc |
| 61861 | cattcaacct ttaattacat aagctgtttt caaaaatcac |
| | attcagcgtg gagattttcc |
| 61921 | aRagatgctg gagttggcag aYggccacca cgtagctYtc |
| | cactttccac aaatggcctc |
| 61981 | tgccagcttg ggaagaacct ccatgacctg tgtcctgaga |
| | agtcagagag caagggcccc |
| 62041 | acggccatgg cagggtggag ccgtgtaRag ggtggccagg |
| | tggccagctc gcggattcca |
| 62101 | tccagagagg agactcaagg atcatgctaa gtagggaacg |
| | gggttcccac acgtcctcag |
| 62161 | gcattcaact cctgggccag ggtccgtaac aaagggagac |
| | ttcagccctc aaagcctctc |
| 62221 | actcctcagg tctgggcagg aggtccttct gccaagcagc |
| | tcctcctgcc cttcgcctgc |
| 62281 | tttctgccag gagagacctc tgtgtagagc tggctatgag |
| | gtacctgcac catttaacct |
| 62341 | attctcattt ccatgtcccc atccatgaat catctgtgtg |
| | tgcccctatt tccacatcat |
| 62401 | ccccagggct tcaggtgggc aaggggctca gagtttacag |
| | gtagcctgag ccactttgga |
| 62461 | gctagttttt ctgttcaggg cttgacagat aaagtttcca |
| | gcttccagaa gcttctggag |
| 62521 | attcacaccc tttgagaaac aagttagagg atgcggtaag |
| | tcatggtatg ccctcaacac |
| 62581 | cagggaaaac atcagcatgg Rcagacaact gtgatactga |
| | aaagtaaagg tgaagataaa |
| 62641 | caggcttttt ccttgacagc Rgggcaccag ctgcctgtga |
| | gctcctgtct gtctggcacc |
| 62701 | tgggttattc ctctgactcc ccctcatgta agatgcccaa |
| | tctctgtcat ggtttgtagt |
| 62761 | gccactacca gggcacagat cttatcagtc ttgttcagta |
| | ctccctcttc agggcccagc |
| 62821 | acagggcctg gcccacagag gtaaaaaact gatattcaag |
| | tgacaattgt gaggcagaga |
| 62881 | gKgagggata aaaacaccaa ctgaaagggc cagacagaaa |
| | ccctctgttc atacagtagc |
| 62941 | tcatatttgc tgaagtgcac tctgtgctca gctctgtgat |
| | aagcattcta cataactttt |
| 63001 | ctttcttttt ttttttggag acagagtttg ctcttgtcgc |
| | ccaggctgga gtgcaatggc |
| 63061 | acgctctcag ctcactgcaa cctctgcctc ccgggttcaa |
| | gtgattctcc tgcctcagcc |
| 63121 | tcccgagtag ctggggttac aggtgtgtgc caccacaccc |
| | agctaatttt tcttttcttt |
| 63181 | tttttgagag ggagtctcac tgtgtcgcca ggctggagta |
| | cagtggcgtg atcttggctc |
| 63241 | actgcaacct ctgactcctg ggttcaagca attctcctgc |
| | ctcagtctcc cgagtagctg |
| 63301 | ggattacagg tgcgtgccac cacacccagc taatttttgt |
| | atttttagta gagatggggt |
| 63361 | ttcaccatgt cggccaagct ggtctcgaac tcctgacctc |
| | aggtgatctg cccaccctgg |
| 63421 | cctcccaaag tgctgggatt acgggcgtga gccaccgtgc |
| | ccagcaattt ttctattgtt |
| 63481 | agtggagaca gtgtttcacc atattggcca ggctggtctc |
| | aaactcttga cctcaggtga |
| 63541 | tccacccgcc ttggcttccc aaagtgctgg gattacaggc |
| | gtgcgcctgg ccctctacgt |
| 63601 | acgttttctt acttaatcct cacaatggct ccatgagatg |
| | gatggcatta ttattcccat |
| 63661 | ttcttaggtt cagagagatg aaataatttg tctgaggtct |
| | catagcctgg gagtggcagg |
| 63721 | agtaggcttt aaacccagtt ccatctgatc tttaagcaca |
| | gatgctattc tgcttccgtc |
| 63781 | ccgccactga gggccctggt ggactctggc ggatccctgg |
| | tgagctgtct aacgctactg |
| 63841 | tcctcatttt acagagaaca aaacaaagcc aagagagaac |
| | tgactcattt caggtcatga |
| 63901 | acctgaccct tcccagggcc ccttccatgt tcctggtgtc |
| | tcctaggaMt gaactgtcaa |
| 63961 | agtcaccctg acactccagc cttcttatgc ccatgcgtgt |
| | ggcctcactc aaccctactc |
| 64021 | tcacaaacat taaaatatta gatcaaatat ccataatccc |
| | caacaccctt cccctctttt |
| 64081 | gttttgtttt gaagagatag ggtcttgctg tttcacccag |
| | gctggagtac actggcagga |
| 64141 | tcatagctca ctgcagcctc aaactcctgg gctcaagtga |
| | ccctcctgcc tcagcctccc |
| 64201 | aaagtgctga gattacaggc atgagccact gcgcctggct |
| | aaccctttcc ctctttactc |
| 64261 | ctcagcacct taacaacccc aaataccccc atccactttt |
| | gttctcagct tcaggccccc |
| 64321 | tggtcagttc ggggctgtcg ccaccagggg gtgggtgggc |
| | ttaccgtgtg aatgcccaag |
| 64381 | ccctctagca tgtagaccag gtcttctgtg gccaagtttc |
| | ctgatgcccc ctgtgcgtag |
| 64441 | ggacagcctc caagtcctgc cacagaagag tccacgacac |
| | tcactcccat ctagaaacat |
| 64501 | aaggatggtg aaacacagtt gttgctgggg acaagaggcc |
| | acagagatga gccttgcaaa |
| 64561 | cctcccaatc gtctgttgcc tgaaattcta gagtcattct |
| | ttgctttggc ttatgattct |
| 64621 | gttgacatga caatcccaca gaaagagaca gtgcttctcc |
| | ttttagtttc tgttaaactg |
| 64681 | tttcctctgc cagcagtatc tttcctttca tggtgaactc |
| | tcattcttta gNttccagtc |
| 64741 | tgaaagccac ctgctcaggg agaccttttc tgatcaccag |
| | cctaaccccc tcccactgct |
| 64801 | gagatttcag acccctgttg tttactgtga ttcatttatt |
| | accccccccc cacttacccc |
| 64861 | ccaccacctc caggctactc tcactcagtc agggccttgc |
| | cacacgaggg ccacatccca |
| 64921 | tcttcccagg tcagtcacct cccactatcc caaatgacta |
| | tttcactttc tcctctcttc |
| 64981 | ttaaacctct atcaccccct tccccatcct cattctcatc |
| | tgctgcttta tggaaatgga |
| 65041 | tgcaatcaag agatgtctcc attgattccc accatcacat |
| | ctacccacct gcctacatct |
| 65101 | gggcctacag acccactgtc cctcatgctg cctgagatgg |
| | acccYgagct cctagccaag |
| 65161 | gccaacccct ccaccttggc gtgaggccca ttcccacctg |
| | cttcaggatg tgctccagta |
| 65221 | agtctctccc tctctgctgc aacctgttac tcccctccac |
| | tgggtcatct tcacacagcc |
| 65281 | tgcgatctct cccatctttt acaaaccttt ttggaaccct |
| | ctaacctcca atttctttcc |
| 65341 | ccccattcaa agcaaagtcc ctcaaaagag ctgttcccat |
| | ttaacatcta ccattctcat |
| 65401 | ttgaacccat tcgaaacagg tttgcgtccc cacaactcct |
| | ccactgaaac agctctagtc |
| 65461 | aaggccactg gtggcctcca tgtagctaag tacaaaggtc |
| | aagtctcttc atctttgcac |
| 65521 | ttgactagcc gcatcatctt ggacaccttc tccatgtggc |
| | ttccagggct ccacatccct |
| 65581 | tggttttcct cctagtgctc tagcctctcc tgaggcctcg |
| | atccagtctt tgctggctct |
| 65641 | tcctcacctc cctgatctcg gttggagccc ttactgctca |
| | ttcctcagac agcttctcta |
| 65701 | tctccactca ctcccagtta actgcaccca ggttaacaca |
| | cctgcctata gatgtctcga |
| 65761 | gcttcacaga tcagaacacR aactgctgag atccggtcac |
| | gcacctctgc cctccaggcc |
| 65821 | tccttgccat gtctctcacc tggattgctg taggctccaa |
| | actggttctt ctctctacag |
| 65881 | tgtattctct acacagcacc cagaggagcc tctttttttt |
| | ttttgataag aagtctcact |
| 65941 | ctgttgccta ggctggagtg cactggcgcc atctcagctc |
| | actgcaaatc actgcaacct |
| 66001 | ccacctcccg ggctcaagtg attctcatgc ctcagcctcg |
| | caaatagctg ggattacagg |
| 66061 | ctcacgccac cacgcccagc taatttttat atttttagtt |
| | gagacagggt ttcaccatgt |
| 66121 | tggccaggct ggtctcaaaa ctcctgacct caagtgatcc |
| | acctgcctca gcctcccaaa |
| 66181 | gtgctgggat tacaggtgtg agccactgtg cccagccgag |
| | gagcctctca aacggaacat |
| 66241 | ttcagatcat ctccctcccY gcccctgctc aagactctct |
| | gttagcttcc cagctcagtc |
| 66301 | tgaaagagtc aaagtcctac aaggcccccg atctggcctt |
| | cctctaaccc tgacatctct |
| 66361 | gcccccctct cctcagtcac actgctcccg ccacatgcct |
| | cctcctgatc cctgaacaca |
| 66421 | gcaagcacac tcctccctca gggctctgcg cctgctttcc |
| | tgggtggggc tcccttccct |
| 66481 | ccccctccct gctagggatc cgcagggctc actccctcgc |
| | ttccctcagg tctctctcaa |
| 66541 | atgctacctt ctgagtgagg ccactctaca gaaaggcctg |
| | gcactgcctt aacctgcttc |
| 66601 | attttttctc cacagtgttt atgaacacct ggcctgctgt |
| | atgtttgttt atttattatc |
| 66661 | tgtctcatag tactagagtg tcagcctcat gagggcagag |
| | actctgtttt ggtcacagct |
| 66721 | gaatccttaa tgctgagaac agtgcctagc acactaggca |
| | ccgttaggtt aggttttaat |
| 66781 | aggtgaataa atggtcttac aatgtgctat ttacacgcct |
| | gtaatcttcc atctgtcttc |
| 66841 | cccacccacc ataacatgag ctcccagagg gcagggattg |
| | ggtcttgtta ccattgtcta |
| 66901 | agtcagcact taacctggca catcgatcca tatttccgaa |
| | gtaactgatg gaagagggag |
| 66961 | gtcagaggaa gctactgcca gacgtcacac agctcaacct |
| | gttccctgat aaattttcaa |
| 67021 | aaaggggatt ctgagatatc actgccatga aacagagaag |
| | cacagaggag caggagtgtc |
| 67081 | ctgagcRtga tcaggatgaa gttttgcctc agactcacct |
| | cagctgtgca gaattcccct |
| 67141 | ttacctgcct ggcaaggcat aggagaggaa gtcactcttc |
| | ctgtctgcct ggctgggaaa |
| 67201 | cgcatgagct gaaggaaagc ccaggaacca gggcagggta |
| | tcacagtaag ctgaaaaatg |
| 67261 | aggagaccac agaactacga accttaacct tgacagccac |
| | aactctgagg aaaccgaccc |
| 67321 | agaacataac agactcacct ggcttagaca cgaacctcta |
| | ggggataatt gagaggaaaa |
| 67381 | aaaaagtggc tggaactgcc atcactatcc tagagatgga |
| | aggttaggcc aatgctacag |
| 67441 | caaggtagct gtggtcagac actaagaatg ctccttctat |
| | ctggctgcca gccaatggat |
| 67501 | ctccattctg gaccagocca cgagaagcaa acctcaaagg |
| | aaactaatct gaggtcttag |
| 67561 | ctcaatctgt ggggaacggc attaaagcct ctccctctga |
| | gtgacctctg ctagcttctc |
| 67621 | tacctcctgc ttcctcatct gcttctgcta cacacccgca |
| | cactgaaaac cctgtatatt |
| 67681 | gtatgagtcc tccctgaacc ccacatcagt cctgaggtgc |
| | aattctgcct agtcatcttt |
| 67741 | cctcttccct caacagcagc ttactttatg ttcttcaagc |
| | ttcactgagg cctcttttgc |
| 67801 | aaatcctccc agatctcctc agctgggatg gggcccctct |
| | aggcttcctg agccccatgc |
| 67861 | ttcctccctt catggcatct gtcataatgc agtgggattg |
| | ccatgtaact cccttgactg |
| 67921 | tctccccaac acagagYtgt acacttcaca tctgggcagg |
| | gtcaccatga ctgtgtccac |
| 67981 | cattgccagc ttggaacctg gcatactggc atcagtaaat |
| | gtttgctgaa agaataaatg |
| 68041 | ataacaagct gtcctgccca ccgtgacctt tgggagaatg |
| | ggcatatgct tttgattacc |
| 68101 | tgcagggcca tcaaggtgtt ggccagggct tgaccatagg |
| | tgtcatggca gtggacagcc |
| 68161 | agggcagcca gaggcacttc ctgcatgaca gcagaYagca |
| | tgtctttcat gatccctggg |
| 68221 | gtgcccacac caatggtgtc ccccagggag atctcgtagc |
| | agcccattga gtagaacttc |
| 68281 | ttggtgacct aaggaagcaa gcaggcactt ggaggataca |
| | gaatccacca gccaggggat |
| 68341 | ccatgcactc agaagagggg gcctttgcct gggcagaaca |
| | cttctgggta tgacgcactc |
| 68401 | agttcctact ggattacatg ctcctcacca ctccaactgg |
| | gaatgatgat cctcaatcta |
| 68461 | tgatcaggag actgaggcgt aaggggcaga gccagccgct |
| | ggagccagcc cacagtcctg |
| 68521 | aagctccaac ccccgtgctt tcctccctac ctgtgcccct |
| | cagacttcag tctcacttac |
| 68581 | ggctgtcaca tcatactgtc agacccaggt gctggaatca |
| | gtgaagttga ttccttccat |
| 68641 | gtcgttttat cctcagcaat aaaatccatg aaatcatggg |
| | tctgagatgc tagttatatt |
| 68701 | ttttttcttt tttttttttt ttttttgaga ccgggtctca |
| | ctctgtcatt cggctagagt |
| 68761 | gcagtgKtgt gatctcggct tactgcaacc ttggcctctc |
| | agactcaagc aatcctccca |
| 68821 | cctcagcctc ccaagtagct tggaccatat gtataaaaat |
| | gtatatattt tacatatata |
| 68881 | tattttttga gacagagtct cactctgtcg cccaggctgg |
| | agtgcagtgg cacaatctcg |
| 68941 | gctcactgca agctctgcct cctgggttca agtgattctc |
| | ctgtctcagt ctcccaagta |
| 69001 | gctgggatca taggcaccta ccaccacgcc ccactatttt |
| | ttgtattttt agtagagacg |
| 69061 | gagtttcacc atgttggcca ggctggtctt gaactcctga |
| | cctcaggtga tccacatgct |
| 69121 | tcggcctccc gaagtgctgg gattacagtc atgagccacc |
| | atacccggcc aatcaatagt |
| 69181 | ccatatatat atatatatat atattttttt tttttttttt |
| | ttagatggag tctccctctg |
| 69241 | ttgcccaggc tggagtgcgg tggcgcaatc tcagctcact |
| | gcaagctccg cctcccgggt |
| 69301 | tcacgccatt ctcctttctc agcctcccga gtagctggga |
| | ctaccggcgc ocaccaccac |
| 69361 | ccccggctaa ttttttgtat ttttagtaga gacggggttg |
| | caccatgtta gccaggatgg |
| 69421 | tctcgatctc ctgaccttgt gatctgccca tctcagcctc |
| | ccaaagtgct gggattacag |
| 69481 | gYgtgagcca ccgtgcccgg ccaatagtta tattttttaa |
| | tagaggtaca tcactattta |
| 69541 | aatttttgga agcccatttg cacatctcta aaaccactgc |
| | aaaatgggtc catattggaa |
| 69601 | taggtccaat atgggtccaa ttggaataag ccatactgga |
| | atagggtggg cccctaatcc |
| 69661 | catacgactg gtgaacttaa aaaaagatgg cctcacccaa |
| | ggagctgctg cccacacggg |
| 69721 | gctgctggac aaggtgcaga gggatgtggc agggaaaggg |
| | gaccagaaga caccagtgat |
| 69781 | ctgctaaata aatgaaatgg tgacgtcgct tccccagtgg |
| | ccctgcagag tgtggggcgg |
| 69841 | cagtggctgg cctttagggg gcagcagggt gcaggggaag |
| | gagcaggcct ttgaagtcac |
| 69901 | gagatgctgg gttaaagtcc tagttctgct gttcactagc |
| | tgtgggcctt ggcaagcaac |
| 69961 | ttcacttttc tgagcttcaa tttctgcttc tgaaaaatgg |
| | tgatgaccct ttggtcataY |
| 70021 | ggcaaggatt gtggcaactg aggctaagac ctggagcagg |
| | gcagctgctc tcaagaaaca |
| 70081 | gttgctactg ttaccattcc acctatctgg atgccacaaa |
| | gtatcctggg aagaagtggg |
| 70141 | ctttggagag agaaaaaatg gggtttgata cctgatttca |
| | ccatttgtaa cctgtgtggc |
| 70201 | aagttattta gtgtcagttt tctcaactgt aaaagggaat |
| | aataatacca aatttgcaca |
| 70261 | gtggttttga ggactaaatg acataagttc ttgggctggt |
| | caaactcaat tcccatgcca |
| 70321 | tgttcttctc agtgttgacc tggtgactgt tcagaggaca |
| | tcagggttgt ggcctttcaa |
| 70381 | tcactacaag gaactatggg aactcctggg taaggagccc |
| | ctcctcagag aatcacctca |
| 70441 | acgaccagac tggaaactga attggaggtt ttcaggctgg |
| | atagaggcca ggggcttcaa |
| 70501 | ggactacatg ttcggctagg aggggggcct ctagggagca |
| | agtgcagggc tgtgctcaca |
| 70561 | gcaggagctt aatgaaggag ctgggtgaat gaatgaagtc |
| | aggaacctgc cagaaagggt |
| 70621 | ggggagagga acctatgcgc tcaggggcag acaaggtggc |
| | caaccctcac caaacccccc |
| 70681 | gccctgacac atgcacacac ctcagctact ttagctgggg |
| | agatcttccc ttcataaggg |
| 70741 | cagccaagag cacaggagac gtacctgtgg gaagacaggg |
| | gaggaatgag gtcagtgtcc |
| 70801 | tgagcttttt ggctagcaga actgaggcag ggctgtttaa |
| | cacacatttc tgatcagtgt |
| 70861 | gcaatcaaca cctgcagctg ggcggagtaa gggcagggat |
| | ggtacaattc agtgccagga |
| 70921 | ggaggcagta gagagcaatg gcagggaact gggggacaat |
| | ggacctacaa ttgaggaagc |
| 70981 | agaagttgca caggcctcag gagaggcagc caaggattta |
| | caataagcgg aggaggagct |
| 71041 | agagagggca aggagagtaa gcagctgggt tgtaaggtgg |
| | ggagatggag caaaactacg |
| 71101 | tgccagagga gctggggcca gtactccaaa aggagaccaa |
| | agactgggta aaaccaaact |
| 71161 | cagaacaaga gctgagttgg atatgagtca gtaacaggct |
| | gggctggcct gaggaccaag |
| 71221 | ggatgagctg ccccagtgag atgctagagg attcattcat |
| | tcatttattc acctgatgtt |
| 71281 | tactgagttg cctgctatgt gccaggcact ggcacagagc |
| | agtgggcaag actgataagg |
| 71341 | ttcctgccct ctcagagctt atctcaagtt agggagatgg |
| | ccaataaaaa agcaaccaag |
| 71401 | taagtaatgg agaaaatctc agaagtgatg tgccacagag |
| | gaaagatggg aaatgatagg |
| 71461 | aacaagtgga ggaggccaac tagtgagggt ccaggaaaga |
| | tccctctgag gacaggatgc |
| 71521 | tggagccgag aggagccggg ggtggtctgt gagaagagca |
| | ttccaggcag agggaagacc |
| 71581 | tgggcaaagc cctgagacag aagagccagg catgctccag |
| | acagaacaaa ggacagctga |
| 71641 | ggcagacaga gcaaggggaa aggaagtatg agatgaggag |
| | gtcagcaagg tgggcacagg |
| 71701 | tctgatcatg ggtcttaggg ctatggtaag gagggtggat |
| | ttgggatgta ggtgacttct |
| 71761 | attcccacct gcccttttgg gagctgtctt taaaaccctt |
| | tagagtcaag caaattctgc |
| 71821 | atattaagag gcataataaa tgttcaacag ataaataatt |
| | tcagactcaa agatctcagt |
| 71881 | gtacttttcc attttgatgc tcccacttat tctcdaacca |
| | ctgctgagca agaaaaaggt |
| 71941 | aagagagatg cttagaaaga cacagatctg ggagttgggc |
| | caatgttact ggagcacctg |
| 72001 | cttccccatt catccacctg cccgtcagtg actgagtgcc |
| | cactgtggct aggccccaag |
| 72061 | ctgggagagt ggagcacccc agggactggg agagatgtgg |
| | gctttgccct catggagtgc |
| 72121 | acggtctagt ggggtggggc agggagggaa tttaacaagc |
| | agctaagtgc tacatttaga |
| 72181 | ggatgtcccg acaccatggg gtcccagaga agggcactaa |
| | ctccagctga aggactggag |
| 72241 | cagcttctca gaggaactga ctcccacaag aagacctgaa |
| | ggatgagcag gagttatccc |
| 72301 | cgagaagcat gatgtggagg aagtgttctt tattttttgg |
| | agacagagtc ttactctttc |
| 72361 | acccatgctg gtgtgcagtg gcatgatttt ggctcacttc |
| | agcttggacc tcccaggctc |
| 72421 | aggtgatctt cccaccttag cctcctgagt agctgggact |
| | acaggcacat gcaaccacac |
| 72481 | ctggcttttt ttttgtagag ctggggtttc accatgttgc |
| | ccaggcccaa gccagtcaca |
| 72541 | aactcctggg ctgaagcaac ctgcccacct tggcctccca |
| | aggaaggttg ttctgagtct |
| 72601 | agagagagca cgtgcaaagg cccagaggca agagtggagg |
| | catgtgacaa acagaaagaa |
| 72661 | gttccagttg ggctggagtg taccatgaag aggaagcagg |
| | ggccagaagg gaacttgaac |
| 72721 | ggtacggcta cagaaaagag ccgggaccaa atcatgcaRg |
| | gtttgtaaac ctcattaaaa |
| 72781 | agtctgcact tgattagtca ctgaaagctt tttaaccagg |
| | agggatgtga tcagatgtgc |
| 72841 | acttttgtgg ggtttttttg gtttttgttt ttgagacaga |
| | gtctcactct gtcacctagg |
| 72901 | ctggagtgca Stggcgtgat cttggctcac tgcaacctct |
| | gcctcctggg ttcaagtgat |
| 72961 | tctcccgcct cagcctcctg agtagctggg attacaggtg |
| | catgccacta cgcccggcta |
| 73021 | atttttgtat ttttagtaga gatggggttt ccccatgttg |
| | gccaggctgg tttcaaactc |
| 73081 | cttacctcag gtgatctgcc cgcctcggcc tcccaaagtg |
| | ctgggattac aggcatgagc |
| 73141 | caccatgttc agcccagatg tgcacttttc aacgatcatt |
| | ctggctgcaa tgtttttttt |
| 73201 | tttttttttt tttttttgag atggagtttt gctctgtcac |
| | ccaggccgga gtacagtggt |
| 73261 | gtgatctcgg ctcaccacaa cctccgcctc ccagattcaa |
| | gtgattctcc tgcctcagcc |
| 73321 | tcccaagtag Mtggaattac agctaatttt tgtattttta |
| | gtaaagacgg ggtttctatc |
| 73381 | cactaccacg cccagctaat ttttgtattt ttagtagaga |
| | tggggtttca ccatgtcggc |
| 73441 | caggctggtc ttgaactctt gacctcaggt gatccacctg |
| | ccttgtcctc ccaaagtgct |
| 73501 | gggattacag gtgtgagcca ccatgcccgg cctctggctg |
| | caatttgcac agcagtgtga |
| 73561 | ccttacagta gagtattcgc ccttcctggg cctcggtttt |
| | gtaatttata aagtgaggat |
| 73621 | aacctactcc ctgctgggct attgtgaggt ttcaattatt |
| | atagataata cacacacaat |
| 73681 | gcctggaacc actgatatta gagatgtgat gttggaaaca |
| | tagaagccta ggtaattctc |
| 73741 | cagggatgtg tgaagagcta gtgataaagc caggactcaa |
| | ctgacctcca caaacccgtt |
| 73801 | agtgtcctgt cctgctagat tcctttagca tgatagcagt |
| | ggtgctatca tggctcactg |
| 73861 | cagcctcaaa ctcctggtct caagccatcc tctgcctcag |
| | tctcccaagt tgctaggact |
| 73921 | acaggcgcat gctatcatgg ctagctggta aactgaccca |
| | aaattcaggt ttgagagaaa |
| 73981 | gtacttccta ggatttcttc tgaccacact tatttgggaa |
| | aagatgtcta ggtgtggagc |
| 74041 | tcaggctgcc cccacccagg ataagaagtt tgtggcagga |
| | ggaccacttg agtcagagtc |
| 74101 | tagccccatt ccagaacggt acagaggaaa ggataccaat |
| | gtgctctgac tcacccccgc |
| 74161 | acagaaatat tggctgactg cgctgccttc aggattgcgt |
| | caaacctctg aaaactctcc |
| 74221 | tctatggaac aattgatgtt cttcttggtR aagagctctg |
| | aggcagctcc aaagatgact |
| 74281 | acttccttgg ctccagcagc aacctgccaa catccaggtg |
| | aactcctttc agcacttttc |
| 74341 | tctttttttg tttgagatgg agtcttgctt tgttgcccag |
| | gctggagtgc agtggcatga |
| 74401 | tctcggctca ctgcaacctc cacctcctgg gttcaagcga |
| | ttctcctgcc tcagcctcct |
| 74461 | gagtagctgg gattacagga gcccaYcacc acgcccggct |
| | aatttttgta tttttagtag |
| 74521 | agacagcgtt tcaccatgtt ggtcaggctg gtttcgaact |
| | cctgaccttg tgatccaccc |
| 74581 | acctcagcct cccaaagtgc tgagattaca ggtgtcagcc |
| | atcatgcccg gccagcactt |
| 74641 | ttctctttaa agaacactga cacagagtag caaaaaattt |
| | ctcttaaggt aaattttatg |
| 74701 | ttatgtgaat gttatgggtt gaattgtgtc ctcctaaaaa |
| | tatatgttga aggattaaaa |
| 74761 | cccagcacct cagaatgtga ccttatttgg aaacagcgtc |
| | attgcagata tcattagtta |
| 74821 | agatgaagcc atactggaat agggtgggcc cctaatccca |
| | tacgactggt gaccttaaaa |
| 74881 | aaagatggcc agccgggcgc agtggctcac gcttgtaatc |
| | Wcagcacttt gggaggccga |
| 74941 | ggcgggcaga tcatgaggtc aggagatcga gaccatcctg |
| | gctaacacag tgaaacccca |
| 75001 | tctctactaa aaatacaaaa aattagccgg tcgtggtggc |
| | acacgcctgt agtcccagct |
| 75061 | actcRggagg ctgaggYRgg agaatcactt gaaccYggga |
| | ggtggagStt gcagtgagcc |
| 75121 | Ragatcatgc cactgYactc cagcctgggY gacagagcaa |
| | gactctgtct aaaaaaaaca |
| 75181 | aaaacaaaag atggccaagt gaagacacag agacacagaa |
| | aaggtggccc tgggaaaacg |
| 75241 | gaggcaaaga ctggagagat gcatctacaa gccaggcaat |
| | gccaaggact gctggccacc |
| 75301 | accagacccc agcagagagg cataggacag attctcccag |
| | aggcctcaga aggaaccaat |
| 75361 | cctgctgaca ccttgatttg ggacttctgg cctccagact |
| | gtgagagaat aaatttctgt |
| 75421 | tgtttttaag ccacccaatt tgtagtgctt tctttttttt |
| | tttctttttt ctttttttga |
| 75481 | gacaaagtct tgctctgtca cccaggctgg aatgcagtgg |
| | catgatcttg gctcactgca |
| 75541 | acctccgcct tccgggttca agtgattctc ctgcctcagc |
| | ctcctgagta gctRggatta |
| 75601 | caggtacctg ccaccaagcc tggctaattt tttgtatttt |
| | tagtagagac ggggtttcat |
| 75661 | cgtgttagcc aggatggtct cgatctcctg acctcatgat |
| | ccgcccgccc tggtctccca |
| 75721 | aagtgctagg attacaggcg tgagccaccg cgcccggcct |
| | gtagtgcttt cttacagtag |
| 75781 | cactaggaaa caaacacagt aatttctctt aattaaaaaa |
| | aaaaaaactt tgattttccc |
| 75841 | caaggaaacc accaccactg ccatcaccac cctggaagtc |
| | actcttgaga aaaagctttt |
| 75901 | ttttttttct tgctgtgtca cccaggctgg aagagtgcag |
| | cggtattatc atggctcact |
| 75961 | gcagcctcga actcctagtc tcaagccatc ctgtgcctca |
| | gtctcccgag tagctaggac |
| 76021 | tacaggtgca tgccatcaca gccagctaat tgattttttt |
| | tttttttttt gtagagacaa |
| 76081 | ggtctcctta tgttgctcag gctggtctca agcttctggc |
| | ctcaagctgt tctccggcct |
| 76141 | cagcctccca aagtgctggg attataggtg tgagccactg |
| | tgcccagcca aaaaaaggtt |
| 76201 | tttgcctaaa tacagaacca acgcctccaa agatgttctt |
| | gtctaaaatt gtaagaaagt |
| 76261 | tggcagatgc cagcaactac tgttgaaact cttgtggaga |
| | gtttggttac atttctctaa |
| 76321 | agaagtggat aatcaaaaga gctaacattt attaagcagt |
| | taccttttat ctggctcttg |
| 76381 | ctaagcaatg tacatgcatc ctatcttctg aaatgctcac |
| | aacttcaggt actatcattt |
| 76441 | agccctattt tataggcttg tcaacttgtc aagatcacag |
| | agcagtgagt ggcagggcca |
| 76501 | ggtttgcccc agggtctggc tgacagacaa gctattcaga |
| | tggacatccc aggacagggg |
| 76561 | actgaggcgc caagacaagg cagggaccaa tgccatcaat |
| | ctcatttcag gagcccccac |
| 76621 | caacaagcta tcctcttacc gctgcctcga agcctttcaa |
| | atttggggtc aggactgggt |
| 76681 | agttgatgcc aggaaacttc tgaatgccct tcaagacttc |
| | agtgtggtca cccatctagg |
| 76741 | aaccaaggga gacattgcca agtcatcacc aagagcagac |
| | agagagttca gttagagaaa |
| 76801 | accttttcat cacaaaacct ctgttctcca gaactcttag |
| | cgagtaattc cttctgcaga |
| 76861 | gctgagtctc tccaatactt ttactgtttg tttgactgct |
| | gatggctcag aagggccctt |
| 76921 | ggtttggctg agatcccaat ttctccatat ggcccatact |
| | gccagcttta catatgcaga |
| 76981 | aacagcagga atactactac cagccattta ttgagaatgt |
| | actctgggcc aggcactgag |
| 77041 | ctcagctctg tgttaagcac tcctttgtaa caggatgttt |
| | cttcttcact taactatctt |
| 77101 | tgtgaagcag gagttgtcaK tcttcctctt ttacaaacaa |
| | agaaaccaca gacaggcata |
| 77161 | gagggtttta gactttaggg ctagaagagg tcatctctaa |
| | cactgaggag gggaaggcct |
| 77221 | tagcaatgtc actgagcaag tcagagcaga gccaagactg |
| | aacccaaggc cctgaatcct |
| 77281 | gggtcatgtt cttttgctgc aacacagtgc tatgaatcac |
| | ctgagacctc tcaaagccag |
| 77341 | gggcttggaa acctatgttc tcaacttcta cttgcttcaa |
| | aggcaaatgc aaaacttttc |
| 77401 | atccctRgag aaaggccttt cattgagggc tagggctcac |
| | ctggggaacc cacttaggag |
| 77461 | acacaaagct ggtggtttct ataacagaga gtcctgcttc |
| | agaaagcatg tctatcagct |
| 77521 | tgattttcac tggagtagat acgatattct atagtggaga |
| | gagaaacacc aaggcagcaa |
| 77581 | agttagtaac aaaacagcct caaaatgcag tacctgttag |
| | ttcaagtact atagataatt |
| 77641 | ttttgcagtg gatgcagctt ctcacctgaa aaggagttat |
| | ttacatagaa acattattct |
| 77701 | gccatgcagg ctttcccgta agtaaatgtg tgttaattta |
| | taatcccatc ataaacaaac |
| 77761 | tgagagcaat gtgtgatggc ctgaaagggc agagatgact |
| | aaccctctgg ggagtatggg |
| 77821 | atggggcccc caaagtatca caccctcctc gcttctgtct |
| | cccaattggc ataggacttc |
| 77881 | agcctcatgt gttcagcgta tagcttcttt atcttcctcc |
| | ccaccatgtc cagtagctca |
| 77941 | acagattcca tggattcctc tttccaaatc taccatcatt |
| | atcctgtata taacatggca |
| 78001 | tagtctcaag ccactaattc atcttacaca ggaatcctcc |
| | taaaatgcag cttccaacct |
| 78061 | tccattctct tgcatcaaaa gctttctatg gctccctaat |
| | atttacagga ttacgcaaaa |
| 78121 | aattctaaga actccaggtc caggcggaca cattggctca |
| | cgcctgtaat cccagcactt |
| 78181 | tgggaggctg agacaggcag atcatttaag cttaggagtt |
| | tgagaccagc ctgggcaaca |
| 78241 | tggcgaaacc ccctctctac aaaaaataca aaaattagcc |
| | aggcgtggtg gcacgtgtct |
| 78301 | gtgatccagc tactcaggag gctgaggtgg atcactggag |
| | cctgggaagt cgaggctgca |
| 78361 | gtgagcaatg attgtgccac tgcactgagt gacacagagc |
| | aagaccctgt ctcaaacaaa |
| 78421 | aagaacacac aaaaatactc caggtccttc tcgctaggtc |
| | ctccccttgc ctgccttctc |
| 78481 | cagtttctct cccactgctc taacttaatc tttccacaaa |
| | aWtttttttt ttttgagatg |
| 78541 | gagtctcact gtattgccca gagtggagtg cagtggcaca |
| | atctcagctc actgcgacct |
| 78601 | ccgccttccg ggttcaagcg attctcctgc ctcagcctcc |
| | agagtagatg ggattWcaca |
| 78661 | agcatgccac caccccagct catttatttt agtagagatg |
| | gggtttcacc atgttggcca |
| 78721 | ggctggtctc aaactcctga cctcaggtga tctgcctgcc |
| | tcagcctccc aaagtgccag |
| 78781 | tattacaggc atgagccatc atgcccagcc tgtcaaataa |
| | tttttgaaag ccctccatgt |
| 78841 | tgcaggcatt gtgctaggtg ccggggatat agcagtaagc |
| | agaagcagaa cagacaggat |
| 78901 | tYtgcccttc Rggaacttac acactattgt ttccaacaag |
| | cactcactat taaagctagg |
| 78961 | atggacgtgc taaaaaaaaa aaaaaaaaaa aaaaaaaaga |
| | gaaaaagaaa aaagcttttc |
| 79021 | ttattgaaaa aataatcaat atatgattct ttcagaaaaa |
| | catgccaaaa acaaaagaaa |
| 79081 | accaccctta gaatctccca gtgataacgc tattaacacc |
| | ctggtgtgta actttctaga |
| 79141 | tctgtgcagc ccaatatgtc actagtcaca tgtggttatt |
| | taaatttaat aaaaattgta |
| 79201 | taaaaataaa aatacaattc cttggccaca ctagtcacat |
| | ctcaagttct caagggccac |
| 79261 | atgggtatag tggccaccac atggaaaagc tcaggtccag |
| | aatatttcca tcttcacaga |
| 79321 | aagtgctggt ctaggtccta gtctagataa atgctcccat |
| | acatatataa acttttttct |
| 79381 | tacataaaag tgttaagatt aaaaaataca tggccaggcg |
| | cattggctca tgcctgtaat |
| 79441 | cccagcactt tgggaggctg aggcaggtgg atcacctgag |
| | gtcgggagtt caagaccagc |
| 79501 | ccggccaacc tggtgaaacc ccatctctac taaaaataca |
| | aaaattagct gggcatggtg |
| 79561 | gcaggggcct gtaatcctag ctattcggga ggctgaggca |
| | ggagaatcac ttgaacccgg |
| 79621 | gaggaggagg ttgaggtgag ccgagattgc gccattgcac |
| | tccagcctgg gtgacagagt |
| 79681 | gagatgccat ctcccaaaaa cacacacaca cacacgcgcg |
| | cgtgcgtacg cgcacatgca |
| 79741 | ctatttgttt ttgtttggag acagaatcgt gctctgcctc |
| | agcctcctga agtgctggga |
| 79801 | ttacaggcat gagccaccac catgcccagt cacatgtact |
| | attttataaa ctgcttgagt |
| 79861 | cactttatat atacctatgt tattaatggc ttcataatat |
| | ttcattttat aaaaagtcca |
| 79921 | tagtgtatct gacccaactt tcctcatact aaatatttaa |
| | gttgtttcca actgttctgt |
| 79981 | gcttaccaaa caggtttgta aggaacaccc ccaaggctaa |
| | atctctacat ttggccttcg |
| 80041 | tgacttgctt tggataaatc cccttacatg gaattgctgg |
| | gtctacccca ccccactggg |
| 80101 | ctgtggacct ggggacacca aacctgttgc accaccattc |
| | agtttatata tatacatata |
| 80161 | ttttttaata agatagagtc ttgctatatt gcccagactg |
| | gtctcaaact cctgggctca |
| 80221 | agccatcctc ccacctcagc ctcccaagta attagggatg |
| | acaggcatga gccacccatc |
| 80281 | cagcttgccc caccatttta gatcatttaa ctgtcacagg |
| | tgtctgtccc tgtttggcct |
| 80341 | cctctactct cccctaactt gtgcagagga atcacatctt |
| | gcatagctct gtcaactgcc |
| 80401 | attgcaccta tcacacgtaa tactcaaagc agatgcttga |
| | aaaaactgtt tttttggctc |
| 80461 | atttccaact ttaccttttc attttgtagt ccatctcggg |
| | gaccaacttc cacaattttc |
| 80521 | acccgctttg gtaaagtgcc catagatgag gtgctgacct |
| | ttggtttaaa agaggaaaca |
| 80581 | aaaagtatga ggaagagatt gccacaattc ccagggagac |
| | caatatgaaa gaatggatct |
| 80641 | atcttcacta ataatgagac aagaagaaat atttctcacc |
| | atttaattca catttggtct |
| 80701 | attttagaat taagaacaaa aagaatattt cacttagtaa |
| | caggaacaag caagagattc |
| 80761 | atccttccag taccggttct cccctgaagt ccagactcct |
| | tttccactgc ctacctgaca |
| 80821 | gctctattcg catctcttca tatagcagtc ccgaaacaga |
| | actctaattt ctcctaaagc |
| 80881 | ccatctgact ccatcctttc catctctgtc aaaggcatcg |
| | catgtaccct actgcataag |
| 80941 | ccagaacttc attgagccat ttcacctatt caccatggcc |
| | tataggactc tgtatgctgc |
| 81001 | tgtatgtatg ttagaagtag tttaaaaagg ccaggtattg |
| | cggggggcag tggctcatgc |
| 81061 | ctgtaatccc agtactttgg gaggccgaag cgggcgatca |
| | cttgaggtcg ggagtttgag |
| 81121 | accagcctga ccaacatggt gaaaccccat ctctactaaa |
| | aatacacaaa aaatagccgg |
| 81181 | gtgtggtggt gcacgcctgt aactccagct actcaagagg |
| | ctgaggcagg agaattgctt |
| 81241 | gaaccaggga ggtggaagtt gcaatgagcc aagatcgtgc |
| | cactgtactc caccttgggc |
| 81301 | gacaSaggaa gactccattt ccaaaaaaaa taaaaaaagg |
| | ccaggcacgg tggctcatgc |
| 81361 | ctgtaatccc agcactttgg gaggccaagg caggcagatc |
| | acttgaggcc agaggttcga |
| 81421 | gatcagcctg gccaacatga tgaagaaacc ccgtctctac |
| | taaaaataga aaaattagcc |
| 81481 | aggtgtggtg gaatggacat gtagtcccag ctactcaaga |
| | ggctgaggtg ggagaatcgc |
| 81541 | ttgagcccag aaggttgagc ctgcagtgag ctatgactgt |
| | gccactacac tccagcctgg |
| 81601 | gcaacagagc gagaccctgt ctcaaaaaaa aaaattaaat |
| | gactctatat gtcacttgat |
| 81661 | gctttccaat taagaaaaga aaagactgta tgagttgcct |
| | cctctgacct cctggaWtca |
| 81721 | tcactcgccc ctacYgtcca ctcccaacct ccacccaaca |
| | ggttgctaag ctccctgcct |
| 81781 | tctcttccct ctgccccagg gttcctcatc tggctttttt |
| | taaaaaaact ggctgttctY |
| 81841 | acatctctct ctcatctttc agttgcagag aggcttcctc |
| | tgaccaccct ttgcaaagct |
| 81901 | gccattcctc ccacccccat tattttcgct attgcagagc |
| | tataattatt tccttcaaag |
| 81961 | cacgataaag aatgcctact caatgtctct tccagtagaa |
| | cataagctct ttgagggacc |
| 82021 | ttgtctgtct caactccact tcatccctag tgtttggcac |
| | cgtgtttggt acaaagtagc |
| 82081 | cactctttaa agttattaaa ataacacata aaccatgaag |
| | gacacagctg tcccagaaga |
| 82141 | gagcaattac tgagtgtggg gaggagtagt cagtcctgga |
| | cttttcgggg tatgggcgag |
| 82201 | atgcaggagg gctctcttct gttacagtca taggctgggt |
| | gatgacaagc atgggtctaa |
| 82261 | ggggaggtga cacccccagt agctgaagac agtttttaca |
| | aaatgccctg agtctcctct |
| 82321 | atataaagtc agctcaaaat cttagtcttc cctatcaagt |
| | aacacaatac tttttttttc |
| 82381 | ctctttcctc tacctgtctt gatactgtaa cttttcaaat |
| | caactttgtt ttacagattt |
| 82441 | aatctggata aatatactac aacgaggcaa agcggaaggc |
| | acactgtgtg atccgctaag |
| 82501 | gatctcaacc Ycctgaagtc ccccaggaat tccctgctag |
| | gaagcagctg gaacatgtac |
| 82561 | aactcacctg actggccttg ttttagccaa caagctttct |
| | tagagactaa ggcgatgagc |
| 82621 | cattgaattt catgacgtca acaggctaag ttggaaggtc |
| | cctgcaactt gaatctccct |
| 82681 | ccaacaggga tgttcagcct ctgctagtat atcaccctaa |
| | aactatctca ctggaacata |
| 82741 | agtttcatga gacagggact ttgttttatt caatgctgta |
| | tttctaaggM cctgggacat |
| 82801 | aataggggct cgataaataa cagttgagtg ttgctgaaat |
| | aatctaaaac ctgcttcagg |
| 82861 | ccaagcgtgg tggctcacgc ctgtaatccc agcactttgg |
| | gaggccgagg tgggcagatc |
| 82921 | acctgaggtc agaagttcga gaccagccta gccaacatgg |
| | tgaagcccta tctctactaa |
| 82981 | aaacacataa attagctagg catggcagca ggtgcctgca |
| | atcccagcta ctcgggaggc |
| 83041 | tgaggcagga gaattgcttg aacccaggag gaggaggttg |
| | cagtgagctg agatcgtgcc |
| 83101 | attgtactcc agcctggggt acaagagcga gacttcttca |
| | tctcaaaaaa aaaaaaaaaa |
| 83161 | aaaaaagctt ctaaaacctg cttccaagct gcttttatta |
| | gaacattata aactcaattc |
| 83221 | cacttccttc cttccccgta acagctcttc acataataat |
| | tcagttttta aacacttaat |
| 83281 | atttgccagg cacatacaag agccatttac atatttattt |
| | atWtatttat ttatttgaga |
| 83341 | tacagtctca ttctgtctcc aggctggaga gcagtggcgc |
| | gatcttggct cactgcaacc |
| 83401 | ttcacctccc aggttcaagt gattctcctg cctcagcctc |
| | ccgagtagct gggactacag |
| 83461 | gtgYgcacca ccacacctgg ctaatttttt gtattttagt |
| | agagacagga tttcaccagg |
| 83521 | ttggccaggc tggtcccgaa ctcccgacct caagtgatcc |
| | acccacctca gcctcccaaa |
| 83581 | gtgctaggat tataggcatg agccaccacg cctggtgagc |
| | catttacata ttaacccata |
| 83641 | ctgtcctctc aacaatctta tcaggtagga actatcatca |
| | tccccatttt actgtaagaa |
| 83701 | atctaaggcc ccacttggga ggctgaggca gaagaatcgc |
| | ttgaacctgg gaggcagagg |
| 83761 | ttgcagtgag ctgagattga gccactgcac tccagtctgg |
| | gtgacagatg acagagcaag |
| 83821 | acaccgtctc aggaaaaaaa aaaagaaaga aaagaaaaga |
| | aatctgagac ccaaagagat |
| 83881 | taagtaatct tcccgaggtg acatggggag ttactNNNNg |
| | aggcaatatc taaacctggc |
| 83941 | agtgtggctc tagagcacaa gctcctaacc tctgggccac |
| | tgttgcctct ttaccaccgt |
| 84001 | tcgttcggtc cacagtcttc tcctggttaa acatcccgtt |
| | cctcctctgt aaagctctgc |
| 84061 | tcagagaggg tccccctaac cacacaagta ctgtgccaca |
| | gtgtcctgag gtatggtgta |
| 84121 | cctgcatcaa caccaacagc gaatactgac taaacccagt |
| | gttaaactac aggccaggga |
| 84181 | ctattattat cccaactccg taggtgaaga aactaagcct |
| | cagaaaggtt acccaaaaat |
| 84241 | cacaattaga aagtgacaga gcttggactt gaacccatat |
| | ctaggcctaa tactaatact |
| 84301 | ggttcctatg cttggaaccc catggagggc catctcatta |
| | caccaaatat ttcttaaaag |
| 84361 | cttattaata tctactattg cgtttaactt tccaagttgg |
| | aattgccatc ttcattttac |
| 84421 | acatgagcag gtggtgcagg tgaatggcca agtaaagata |
| | ttaacgtggc tttctgagag |
| 84481 | ggacccagtg ccaggagtgt atttttccct ctatacagtt |
| | ataactcctt ctcaactccc |
| 84541 | taaggtaaaa ataccaccac cgactgatca cttattagga |
| | gccagaacac tgccagatgt |
| 84601 | gttacttaca ttttctctaa tttccaaaac aaccccaagg |
| | gaatgttgtc cgttttacag |
| 84661 | acgaaagagc tgaggtttag agaaagtaaa taactatgtc |
| | attaagtcta gaaagtggca |
| 84721 | gaactattgg gacaccctag cttcagcttt tattttttct |
| | gctccataca gctacgtctc |
| 84781 | ccacactttt tctgcgctga gaatgggaga ggggaaaaca |
| | tcaggatcga acaggatcaa |
| 84841 | agtgcaattc caagggaatc acagcttggc tccaatcaac |
| | gcaagtcccg ctcggtaggc |
| 84901 | tgggatagtt ccccaagcat ctctaaaagc aacaacagtt |
| | ggaaatggag acgaaggaaa |
| 84961 | tggaagcgtg ttcttgattt tcactaatga agagttggag |
| | aggtctgaag ttcaattaga |
| 85021 | gggagaaagg ggccagggtc atcggaaagg gccctgggcg |
| | gggaatcagg gcacctagga |
| 85081 | tggcgtccca ggtctccatg acccagacaa gtcactccac |
| | ctctccggac ctcagttttc |
| 85141 | ccatcccctt caaaggattt gaggggaaaa gggagggtcc |
| | aggactccaa cgccctcccg |
| 85201 | actctggcct gagagctgtc cggcctcgcc tctaagagag |
| | cagtcaccac gggccaagcc |
| 85261 | cccaaccctg acagtcagag tgcctgcagg gccgccgcct |
| | cggcggctcg gggcacttac |
| 85321 | agcccggagg gacgccaagc ccaccagtcg ccgcggaagc |
| | gccttcctca ttgctgccat |
| 85381 | cttggcccag aatcccccgc ggcagtccag ctgggccccg |
| | cgtgaccgat ggctcgtctg |
| 85441 | gtgggcgcgg ccccgccccc gcccctccgc Mgtgacttcc |
| | gaagctggct ccacccccag |
| 85501 | cctctctccg ttttgattcc gagcgcctct tccatgccag |
| | gccaagtgag acgctaggaa |
| 85561 | tataaagatg aacagaatca gcctggacac catgtaatcc |
| | tagcactttg ggagaccgag |
| 85621 | gcgggtagat cacctgaggt caggaattcg agaccagcct |
| | ggctaacatg gcgaaacccc |
| 85681 | cgtctctMca aaaaatccaa aaaaaaaaaa aaaaaaaaaa |
| | aaaaaaaaaa aaagccgggc |
| 85741 | gtggtggtgg gcgcctgtaa tcccagctac ttgggaagct |
| | gaggcaggag aattgtttga |
| 85801 | acccgggagg cgaggttgca gcgagcggag atcgtgccac |
| | tgcactccag cctgggcgac |
| 85861 | acagtgagag cctgtccaaa acaaaaaacc caaaaccaaa |
| | caaacaaaaa catgaaaaga |
| 85921 | aattaaccaa attctgtggc ttcttgtgtt tagagtgtgg |
| | gaggtgtgag gagacacata |
| 85981 | ttaatagtta cacaaacagt tgtgtcattt ctaacttgca |
| | ctataagaag caacgatttg |
| 86041 | ctactcactg ttccgagttc ttagcacgga ttaactcacg |
| | catcacgatc ttcaggattc |
| 86101 | aaacacaggc aggcagctcc agagaggggg catccttaga |
| | tttcatacct taaaaaaatg |
| 86161 | attaagattt atctaggtgt actttctgaa gggctNaaaa |
| | aaaaaaaaat ctatccaggt |
| 86221 | gaagaggata caagaaaaac tttccagacg gtgtagcatt |
| | cgcaatggcc ctgaggcaaa |
| 86281 | gaaaatgctg agaacactgt ttttctctct tttgttttgt |
| | tgKtttgttt tgtttgtttg |
| 86341 | agatggagtc tcactctgtc acccaggttg gagtgcagtg |
| | gcgcgatttc ggctcactgc |
| 86401 | aacctccgcc tcccgagttc aagagagtct cgtgcctcag |
| | tctcccgagt agctgggatt |
| 86461 | acaggtgtgc accaccacgc ctggctaatt ttagtgtttt |
| | tagtagaaac gaggtttcac |
| 86521 | cgtgttggcc aggctggtct caaattcctg acctcaggtg |
| | atccgcccgc cttggcctcc |
| 86581 | caaaatgctg ggattacagg cgagagccac cgcccccggc |
| | cagagcactg ttttcaaact |
| 86641 | gtatgttgta ccccactaat tggtcacagt atcaatttag |
| | tgggtacaaa ctttatttaa |
| 86701 | aacaaRgaac tagaatttta tctatctatc atctatctat |
| | ctatctatct atctatctat |
| 86761 | ctatctatcc atctatattt atttattaag acgaagtctc |
| | actgtgttgc ccaggctgga |
| 86821 | gtgcggtggc gtgatctcgg ctcactgcaa cctctgaccc |
| | cggggttcaa gcgattctcc |
| 86881 | tgcctcagcc tccggagtag ctgggattac aagtgcccat |
| | caccgtgccc agataatgtt |
| 86941 | tgtattttta |

[0432] Following is a GALE region genomic nucleotide sequence that includes the GALE SNP “HT014-AA” (SEQ ID NO:).

GATATCCTCCTTCCAGCCAAAGCGAAAAGGTAATTTTCTATATCTTCTTTTTCTTAATGGGAAAAAGATTTAAAAATTCATTCAAG
GCAGGGTACAGTGGCTCACACCTATAATTCCAGCACTTTGGGAGGCCGAGGTAAGAGGATTGCTTGCGGCCAAGGGTTCTAAACCA
ACCAGGCGTGGTGGCTCACTCCTGTAATCCCAGCACTTTGG[G/A]AGGCCGAGGCGGGCAGATCACCTTAGGTAAGAAGTTCGAG
ATTAGCCTGGCCAACATGGTGAAACCCTGTCTCTACTAAAAATACAAAAATTAGCCAGGCATGGTGGTGGACGGCATAGGGAAGAG
GAGGAATATGGTATCCAATCTAAGGGAAAGAGAAGATGGGGACAAAGACAGAACCTAGCTTCCAGGAGG

[0433] Following is a GALE region genomic nucleotide sequence that includes the GALE SNP “HT014-AB” (SEQ ID NO:).

TGTTACACAGATTTTTGTGATATTCTGTCACAGCCACCAAAAGCAACTAGCATAGTGCCTCACACTTCGCATTTTTAAAATTTAGG
GAGTTATTTTTTTCCTAGAATTGTGGTATTTTAACATACTACTAAGATGAAGACCAAAAAATTTTTGGGAAACTGGTCACTCCTAG
GTAATTAAATAATCAGAAAAAGATATGAGGCTGGGCATGGTGACACACGCCTGTAATCCCAGCACTCTGGGAGGCCAAGGTGGGCG
GATTATCTGAGGTCAGGAGTTCGAGACCAGCCTGGACAACATGGCAAAACCCCATCTCTACTGAAAATATAAAATAGCTGGGCGTG
GTGGTAAGCACCTGTAGTCCTGGCTACTTGAGAGGCTGAGGCGTGAGAATCGCTTGAACCCAGGAGGCAAGGGTTGCAGTGAACCA
AAATTGCACCACTGCACTGCAGTCTACACGACAGAGCAAGACTCTGTCTCAAAAAAAAAAAAAAAA[A/T]ATGGAAAAGTGCTTG
TACACAAATGATGTCCTGGTTCTGGTTTCAGGTATTAATTGAAGAAACAGATCAATTATGGAAAGTTCATTGTCACCGAGACTTTA
AGGAAGAAAGACCCGAAGAGTATGAGTCGTGGCGAGAGATGTACCTGCGGCTTCAGGACGCCCGAGAGCAGCGGCTACGAGTACTA
ACAAAGAATATCC

[0434] Following is a GALE region genomic nucleotide sequence that includes the GALE SNP “HT014-AC” (SEQ ID NO:).

GTCCAATCCCTTCACTTCACAGGGGGTAAACTGAGTCTCAGAAGATCAAGTCACTTGCCCAAGGCCACGCAGCTAGTAAGTTGCTG
TGGTTGGATTTGACCGTAATAACCATCGGCTACTGAATGCCCATCATGTGTCAGCCATTTGCTGAGTTTTTTCTTTTTTTTTCTTT
TTGAGACAGAGTCTTGCTCTGTCGCCAGGCTGGAGTGCAGTGGCGCGATGTCGGCTCACTGCAACCTCTGCCTCCCGGGTTCAAGC
GATTCTCCTGCTTCAGCCTCCCGAGTAGCTGGGACTACAGGCTCGCGCCACCACGCCTAGCTAATTTTTGTATTTTTAGTAGAGAC
GGGGTTTCATCATGTTGGCTAGGATGGTCTCGATCTTTTGACCTCGTGATCCGCCCGCCTCGGCCTCCCAAAGTGCTGGGATTACA
GGCGTGAGCCACCG[C/G]GCCCGGCCTGCTGAGTTCTTTAATTGCATTATTTCATTTAATACTCACTGTGATCCTATGAAACAGA
TACTATTCTTTCCACCTTACAGACGGGGAAACGGAGTCTCAGAATAGGGGAAATGACTTAAGGTGTCACAATGGCCAGTAGCAGAC
CCAGGAGTACTCTTTAGGTCTGGCCGTGCACAAAGCCCCATGCTCTCAAGCTGTAACCCCGCTATCAAGAAAGTGGTTATGCAAGT
GGGCCTGTGAGCTCTCAACGTCTAAGCCGTGCGCATGTGAGACAGCGATAAGCTCGCGTTCTCCAGTCTCCAGGGCCTTATCATTC
CTCACGCTTTCCTTC

[0435] Following is a GALE region genomic nucleotide sequence that includes the GALE SNP “HT014-AD” (SEQ ID NO:).

AAGAGTTAGAGACCTCGGCCTCCTGGTCAGTGGAGCCCTTGGCCTCATCC
CTGGTGGGCTAAGCGGGCCCAGCTGGGGTTTGAGGTAGGGGAGGCCTTGG
[C/T]TTGGCCCCAGCAGCTCCAGGGCCCTGAGTTCCTGCCAGAGGCTGG
AGAGCAGGCAGCTGCTGCTTTTCCTGGTCCTTGGTAGGGGAGGGTCCTCA
GGCTT

[0436] Following is a DPF3 genomic nucleotide sequence (SEQ ID NO: 6).

| >14:71066151-71351450 | |
|---|---|
| 1 | tccaatctgt aggttctcct ggagattgtc acaatctgcc agctctctgg gaatcacaga |
| 61 | accatcatgt ccccttagga tggcagaaga tgtggcacag cctcaatctc caacactgaa |
| 121 | acactgagag agcttgatac gttccttagg cagggcagaa acatcacagc acttcacgtt |
| 181 | aggaaccacg aaagagtggg aacctgRcac acgtgggaag ggcacatccc cagaggacag |
| 241 | aggacaaggg tggcacacac acctacagag accgcaacca catcacagtg aaggaggagg |
| 301 | acagctaacg gggtgggagg tgggagcttt ttgtttgtct gttgctgtcg ttgcttttta |
| 361 | gagaagccag ggtgggccaa atggagatat tgtctcaaga ccattacaca cagcttccca |
| 421 | aatctgtagc ccttttctgt aacctcatga aagctgtgtc agactcagtc ctggtctgaa |
| 481 | gtaccMaagc agcccaaggc aaaacctcat ctgcaagagg caatgcggcg ttgggtccca |
| 541 | aggatcagtg gggagggtgt tcaaaagagc aaaaagggaa accctctttc ataggcattt |
| 601 | ctctcactgg agacccactc tcttggtcat tcctttatga ctgagagtct cagaaggagt |
| 661 | tgtgagtgtg aggtaaaaga gacaagcaag cattttggaa tgatggggat aaaatgttgc |
| 721 | agtggcttcc ctctctggtg cccatacctg gaagaagcaa tcccaggttt gcttcgtatc |
| 781 | tgcaggtcta gagacatcaa tggaggcagc aattggagat ctcagtgtgt ttccagggtc |
| 841 | tctgactcaa ctagagggca tccaaggcct ggtggagcct gtgcaggcct gagcttcctc |
| 901 | gtggagcagc aggtaggcag ctcattccca gggacctggt catccttcct accataggag |
| 961 | ccacctgcca aagcccaccc agaggaatcc cagcgttcac aaatggaggc gccctcacca |
| 1021 | aagccactgg accagcctgt ccctgagaag agacacagag gggcttcagc aatgagaaga |
| 1081 | agaaaaccaa tttcttttgg cttcttagca gagatgctcc atgtcttggc tgtcagagaa |
| 1141 | attgagctta caaattgccc tcaccctgaa cccacttggc aacggggaga tgacctggtt |
| 1201 | gaggtctagt tctggctttt gtgaatcgac cgtgtgacgt agacagcaca gcatcaggcc |
| 1261 | aggaaggcgc ctgatgagac cgtgttctca gcctgagagc gcgctcaagg gcaggtggga |
| 1321 | gatggagcct tctcagagct cagccactgg ctcttgggct cccaggttca tccctcaagg |
| 1381 | agctggggac ctgagggctc agggcccacc actggctgcc tgggggaagt gctgccagtc |
| 1441 | tggtgtggaa agggtccaag tcagaggcct ttgcctcacc ccttccacca gcagggccat |
| 1501 | tcagagaagt cttggctcaa aagaacgttg cccacaggct ttcaagtagg tgagtggacc |
| 1561 | aaacccctgc atgcttttca ggctgtcacg cactttaaaa ccagactcac agccaagcct |
| 1621 | tgtgtccctg actacctcca cagagatcac cagaattctc ctcactggga gtcatgtgcc |
| 1681 | atccagggcc ccagaggagc cttcccttgg gccacccccc acagagaagc tatagctctg |
| 1741 | agccRacatc cacacatgga cagatacaca ccttccccca agcccaggca ttttgcttga |
| 1801 | aagcaaggtt ggtgtggctt cttcagggaa taactcaaag ctgaaatctg gctgtgacac |
| 1861 | gtgtggagaa aaggaaagat gaaacaaacg gtttattcct aatgctgtca acacaaacaa |
| 1921 | cYgagagtct aagccagcac gaagctagga tctgacaagc acctggccaa aggtgagcat |
| 1981 | ggaaggtttg ctgaaaacct ctctgatgct gggtttcatc cctgcacaca ccagcagtgc |
| 2041 | cagatacagg cgtggggcag ctgaccttgc tggggtctgg tggagtgtgc ccaatctgta |
| 2101 | cttgaagccc ccaccccccc agtcccgctc tctgctttct ctagcaggga aaagaccact |
| 2161 | gtgggggtca ttttctgcct ctgatcaggM cctgccagtt gcacctccct gccttccacc |
| 2221 | ccagaaaccc acaagcagct ctggggacac tggctgccca acacactcca ggccaggtga |
| 2281 | cttcatcagt tcaccagttt taatgctgag gatgctgtca tccaagggca tccagtgctt |
| 2341 | ggaaaagcag attaaagcaa ctaggctgag gtcatctgtt ttcttccccc gacccctcag |
| 2401 | cctccacagg gtagaaatca ctggatgcct ccacctgctt gtcttctact gaggaacacg |
| 2461 | catcctcaac agagaaacct acatatactt acaccttccg tgatggcgcg atacttgacc |
| 2521 | tacaatcacg attgcttggc agagcttaat ttcatggctg aaaagcaact tgaaggctag |
| 2581 | gccagcatgY ggtttatttt ccagccccta caggacctag agcattgcct cgcacaYagt |
| 2641 | cgatgccctg ccaagggttt taatttagcc agtaacagcc tgccctgcaa tgattcatgg |
| 2701 | caggcaaaag atgggttcat tttccttcag aggaaaaacc cccagggtgg acaaccatgg |
| 2761 | cagatgagtg gggggcagct tggatggact ctgttccctt tccYgRccag aggagcacaa |
| 2821 | atgcccccta agcatctgac cattcattgc aaaagcatga cccatctgct ttcccaaatg |
| 2881 | ccatgtggac cagaYgcatt ggtgagccag ggacgccctg cctacctacc ccgcctctct |
| 2941 | ccagccacct gctccccacc tcctctgctc tgagataatc attctatatt ttcatgctct |
| 3001 | tgctcacata tcaggcagtg tttctgtcct tttttttttt ctagtaccta atttaggctt |
| 3061 | cttcaactac atgttgaaaa tgtgcacggg gtatattttc tttttcctWt acgccactgt |
| 3121 | tgcttcccac ttcccacctc caccccactc cttagcatct atcacggcag agggaaggga |
| 3181 | ggaaNcagtg cagggaaggg agagggcagg aggagaatca gggtctcagt ggggagtaga |
| 3241 | catggaaggg caaaccaagt ccgtataaac cacaaacccc attctagcca taaaagcttt |
| 3301 | gcatcccttt gatagcagaa ttgagacttt tgaagtaccc aactattgcc aaatRtcttt |
| 3361 | catgaaaaga agcataggtg aacgaaggga agagaaggag agaggtcgcg gagccagtag |
| 3421 | ctttccaagc acaaggctcc ctttgcaacc ctggtggctg tgcagaggct gagagctgga |
| 3481 | ggagcaggac tggagaagac ttcaggaaag atgcaccttg cctggcagcc cctggctctc |
| 3541 | cctcttgtcc tggagcaaca tcaaagtttc cctttggttc attaagtagg gcgtgtgtgt |
| 3601 | gtgtgtgtgt gtgtgtgtgt gtgtgtgtgt atgtgcgtgc gYgcacgcac gcgcatgcac |
| 3661 | atgggcattc ctgttctcat catcaatatt cataacattg aaatgaagaa cagagatgca |
| 3721 | gagaggcgag caaatgagca aatgggatgc agtgagtgaa aatataacct gggagtctgt |
| 3781 | agggttgtgt tgctgaggga atatRtaggc cccaggggct cacaggcctc tgccatttcc |
| 3841 | tacaaggccc acttacctgc cctcccgtcc ccaccatggc cgcgtttatt tgctagacag |
| 3901 | ggttggtgcc agcctacagg gccattttgc tcaatgcctg ggctagaggt catgataagt |
| 3961 | aattatatct ctgtccaaga gggttctggc tgcctgccag tcctggttcc tgccttcctc |
| 4021 | tggcctgccc tgggaaatgt cgccatcagc aaaatactcc cttctcctgg tggagccaaa |
| 4081 | gaaggggaac tgtggaaggt ccctctctca aggccacctg ccctatgacc tgaggttggc |
| 4141 | actggagcag agaaagggaa ggagtgggga cagaagctgg aacaaagggc cctggggagt |
| 4201 | cacctcagga ccccctcaca gccagggctc actcaRaacc cagagagagc ctgttcccag |
| 4261 | gaacccactc acttccaaat ctttcccctc atgcagggag ttccctgttc cttctagaaa |
| 4321 | acccatggta Sggaactggc aagcccggac ccctcctcct cagagtttcc tgacagctct |
| 4381 | tcctttgggc ctctcttcta gctgcctggg ctgcgcacat ggagggggcg cccgccgcac |
| 4441 | agccaggcct ccccggggac agctgctgag aggctctaag gcagttccca ctcgctctgc |
| 4501 | ctgggaggYt gtctatcctc ccacatcccg ggtgcccagc aggaagcacc cccatcttcc |
| 4561 | tctcccctcc ttccccctgc cccactctca gctgtccact cacagaccag agggtctcca |
| 4621 | gcctccctag gaaggggttc ccagctctcc aagacccacc accagctgcc caaaggcctt |
| 4681 | gaaccaaccc atctgtccca ttgtttccac actcagggct ggtggccgtg gcctctggca |
| 4741 | gagaatcata agcagactcc caaaccctgg gaatgctcag aaatggggga gggagcccca |
| 4801 | acccccagac agctatggag cccaccttct gaccacggac cagttagact ctatggcaag |
| 4861 | ctggggttca ggtagggaga ttcataggcc tgaggcaaat taaaacagct gttccccacc |
| 4921 | atcaccatcc ttccccttca cctggtatcc aaaagcatRc tttggggatg ggagtaagat |
| 4981 | ttcaaaacgg gcaacacaca gcaggaagRg gaggagctct gtccactttg cagaggggag |
| 5041 | aggagcagga tggccagtcc ccctcttccc ttcccagcta ctggtgtcct gggcttgggg |
| 5101 | gacaggggcc tgggggcctg acccctctgg tagcagtgcc tggaaatgct tcactcccca |
| 5161 | aggctgcagg catgatccag ccctccctca ctgccttctc tccccagctg ggtgaggggc |
| 5221 | ttactttgcc ctcagaagca tccctgaaac cccacacaac caacgggcgg cctcaagaaa |
| 5281 | gagggagctg aatcagtgtt cagaactggg cagaggtttg gcctttttac aaaataataa |
| 5341 | taataataat ctgttgccca ggatcacaag cctcagaaaa aaaaaaaaga gttacaatca |
| 5401 | ctgttcactc ccacctgctg ccctccagct ccttagctcg aggatttctc cctgaggaca |
| 5461 | tccagctctc tgcctttttc caccagagat cctcacccct cccaaatgcc ctcccaccct |
| 5521 | cccttcccca ggcacccctg tctttctccc tccccaggaa tggaagcctg ctaaaaggga |
| 5581 | caccaagtca ccactgctac caggagccag gcctgggact tgcggcatcc tgtgggagtg |
| 5641 | tgagcgtggc tctggccaga gccaacttct ccctcRggct gagacatggg gaccccctga |
| 5701 | agaggggcta ggaggggcag ccggggagtg agagaagaag gggctgcttc tgtcccagca |
| 5761 | cttccacgac aggctaaaaa ccagcctggg gggcagggat gtggtcctca gggcccgccc |
| 5821 | tgggccacgg gcggcgcaac accccctacc tcctcacaca cagacccaaa gaggagacta |
| 5881 | taagcccctc ttctttgagt cctgaggcct gaggttgcca gcaacctttc ttcagcggca |
| 5941 | taaaagagca caggtctcct ccacttgccc cgaaaggaaa agtaataaca atcatctcat |
| 6001 | ttttcttcct taaaacatca aaacttttta agcggagggt tgaaaggaag cgggctgtat |
| 6061 | tcaaagcacg aatacaaaaa tgcaccagga gtgtgcaacc ctccagggta tcatgaaacc |
| 6121 | atcactgtga aacccaaacc ctcccccaac ttcaaaacct gttctcttcc ccagttctgg |
| 6181 | aggaatctgg cctccttccc tcccttccac ccacccacag gctcttccct ggttccagtc |
| 6241 | ggctgggctc agcctgccca ggcttccggc ttcctacctc gccctggggc agggacagga |
| 6301 | gcaggggagc cttgggacct gctggctcct gcttcagggg cgatgagtca gtgaggggtt |
| 6361 | ccaaaggaaa gccagaatgt caatctccta gcaggagccc tgtttctatt tccacataat |
| 6421 | gttgcctgca ctggatttgc tacagatcca aaaagcaggg tttcaaaaat gcctacagga |
| 6481 | aacaggattt ccacttccgg ttgggtStgg cagcctcacc tctctggttt gctggagcca |
| 6541 | cagtacagag gggtgaagcc cagcaaagtt ctcctggctg ttcccagcat ttgagccgga |
| 6601 | agacaaccac atcattatct ccatttggtg gcctctgcag aaaatgacaa tagctaccat |
| 6661 | ggagtgggga ccatcatcat gccagacccg ggccRggatc tttaccaatg tcacctYgaa |
| 6721 | tacctgcaaa gaccatgctg gataggccat gtttccccac cttacagaca tgtgaaatga |
| 6781 | ggctcagaga gttgaagtca ttggcccaag gtcagtcagc tagaaagtgg cagtgttggt |
| 6841 | cggaaagtga gcgttaccca tgaactgaaa caaatcatag ccctctctaa aagtcacctt |
| 6901 | tccattctca actgcattaa tcttatagaa ggagtatcct gagtaccttc attttaaagt |
| 6961 | ccccaacccc atgtacatcc ctcacctcca ccccacagcc catgcaagtc atgatttcct |
| 7021 | tggtcgcagc ccagccctgg caatataaac tccctttggt cacaagggag atttgaagaa |
| 7081 | gacgtctaac attggctaat gcacacaaga aggcggacat ggaaaacatc Yggagttctt |
| 7141 | cccagacaag catggctctg cagtgcttgt ttatgtaaca tgatgcttaa gagtcccagt |
| 7201 | gtcactctgg aataggcagg gcaagtgtta ctatctccac tttccaggtg ggcaattgag |
| 7261 | gttcagggag gttaggtgac ttgcccagtg tcacacagct actccatggc agaggcaaca |
| 7321 | caaaaactct gatccttcac atgcatccta tgattctatc tcattctctg gggttcaaaa |
| 7381 | aaaagagacc aatttaaagt ttaccaaccc cgtcctcttt tgaacacaga ggtgataaat |
| 7441 | gtgaccacgg agacttttgt ctgcttgtag taccctgaca gtgccagccc acaagctggc |
| 7501 | ttgctatccc cgctttccag atggggaaac tgaggcctcc aaagatgaag aatgggttgg |
| 7561 | gcccattctt cagggagtaa tgaagctgag aggggaactc cggggccatc ctaacgtcac |
| 7621 | tccagagccc tgaccctcac cagtgcaggc aagttccagt gccctgcctt ggcctgggag |
| 7681 | acccagctga ggctcagctt gtgtaggcag agcagacatg gggctgagat cgaacagggc |
| 7741 | tgccctatca cctgcacttc tgtggaaaac aaatttgcac atactctgaa gaggacgtgt |
| 7801 | gaagttgtag agccacagtt tggggtttcg gacttgcttt ttaaactttt aagctattgt |
| 7861 | ggcacttggg aaYatttggg gaactttttt ttctaaattt aaattaaaat gacgctcaaa |
| 7921 | aNcaattatt agcctttgga gacagcctgc tttgggtttt gtgggaagag agagagctgg |
| 7981 | agtagtcagg agaaaaaatg tgcccctctg atggaatgtc accctcccta tccctccctg |
| 8041 | ggccttcagg attcagacaa gctcaccgac cagcaggcgg aaggaaatta cttatgagga |
| 8101 | agatgaaaat tccatccggt cgggggccct ttaaatgaga ccattatgta tgtgtgtgat |
| 8161 | tccctctgag gccacaggcc cctgcaggag agtgaccccc atcgcttgcc acaggtcact |
| 8221 | ctgctgaagc gtgggggaga cccacactgc ttggtttcat gccaggctgc cctgggtcca |
| 8281 | ctggccaaga gcaattagcc tagagaggag cactcctgcc gagggacagc acaaatactg |
| 8341 | cggccgggca gaggtggccc aactagcccg agtctccggg agcgtcctca ggagctgaag |
| 8401 | aactaaaaat aacctgggcc tttgttgtga gcagccagac cacagagatg gagctgattt |
| 8461 | cagagaagcc aagcatgcgc gagggttccg ctcaccgaga cctgcccttt gggcaaatga |
| 8521 | tttttccaga aatatgtcag ttattgtgct gctgctgcga ttcaaagtca gcccaatccg |
| 8581 | ctccagccct cggggctatc ttccaacaca cagagttctc ggaagctcag cctccccacc |
| 8641 | tctttcttct aRacacattt ttttttgaaa acaagagtcc tgcatgtttg gggagcttag |
| 8701 | gagacaagag cagcccccgc actgagagtt ctaaaatgtg gccaccctgg tcgtgaataa |
| 8761 | tgaccatgtc accctaatta tttgtttaga taacaatctt ctctccccca tcctaaaatt |
| 8821 | cccagtcagg tctcagtaga caatagcgaa caaacactac gtggaaggaa gaaattactt |
| 8881 | ggaaaaagga attcagagcg tcgcatcaat actgaaggtt tctcaaagct gcagccccct |
| 8941 | gtatccagca ttcggacaca tgattgggca gccttcgctc cccttcctgg ttcttcagtc |
| 9001 | ccaccaggag aagctgaacc aggtctccag aaccaggtgg gctgagaggc agaggcttga |
| 9061 | ccgtcttcct ctgtccatag gccatgactg gtctcaccta aaggatgccc cagctctgaa |
| 9121 | ggtcaaggaa ccagcctggc ctcttgcaaa gtctctcccg atggataaca agtactgact |
| 9181 | ggctatggcg gggccttggc accatttcca caatgtttcc tcccatgtct ctgcgcgtct |
| 9241 | ccctccctcc ccgcccccat ctagtaactt taagcagtgg ctcaagacca ggctggctgt |
| 9301 | ggatgccact gctggggttc tagaaggcaa ctctttgtct ccacagacac caaggaacaa |
| 9361 | gaaagggttt caagacccca agtctagaag tttccagtga ggcttgccat aaacgacaac |
| 9421 | ttctccacag ccctttgttc ctcaggtgag aatttcagga tgcagaccct aagctggggg |
| 9481 | cacgggggct gtgccaagat ttcttggaac acaatagata aaaaaacacc acactacaca |
| 9541 | caagtaatgg atgagtggtc aggaaatggc ttcccttaaa atgggaacca atgagagggc |
| 9601 | ctcggtgcta gggtaaaagt gagaggggtt ccacagggct ggggccggag gtgttctccc |
| 9661 | aaagtgcaac ttccttccgg tagagacaag gaggtgctgg ctgaagttcc gtacatatcg |
| 9721 | ggggaggtca ggagatgcct caccctcttc gttccatgtg tccctgcccc tctgggacta |
| 9781 | tttcttttcc ttgcagttgg tctggctgga tatgtgRgag gagggcgcgt tctggtttga |
| 9841 | actgggctct gctttaggat ctccagcagc gagtcacatt ctgtgacctg gggccctagg |
| 9901 | cctggcagcc aaaggctgag gctttctctt tgagcagttc ccagcataag tggcagctcc |
| 9961 | agcttcctgc aagaaatgag acggctttag tagcagcccc tctgctaact ctggagcccc |
| 10021 | accccactgg ccctaacttc ttgtaaatcc tgtttccttt gaactttggc aatgcagaaa |
| 10081 | ccaagtccca ggcctgaaaa cgtgccagag tctgtggctc agcagaaagc aggtgctcag |
| 10141 | aggagatggg ctcaactctt atcaagaccc tcactactag cgtcatgcct ccaaactagt |
| 10201 | gtcgccgggc ctgcgccagt tctcctggaa gctcacacct cccggtcatc tccactgcat |
| 10261 | gtctgggaaa aNcttccttg gccctcaagt tgaaatttca gctgcttgga ctgtgcctca |
| 10321 | gtttcctcat ctgtaaaatg gcagtcgtcg tacctacctt gtggggttgt gatgattaaa |
| 10381 | tgagacaaga catgaacatg taaacccatt agcataaggc ctgtaccata gtgagagctc |
| 10441 | agtaagtgct agtagtagta gtatctgttg ctgttcttat tgttgacttc atcatcatta |
| 10501 | ccttctgggg gctcagccac cgggggattt aaacagtaca tgtgatagcc tcggtcacag |
| 10561 | tcatcgcaga agagtagctg gtcctggtgg aacacagagt aagcacagag gaggagagat |
| 10621 | tccattattc ggggccaatg tctggccccc gcttacccat cagccttatt tccacgtcgg |
| 10681 | tctcactgga tcccctttcc aggccccact tggagtcctc actgtcccct gaacacgcct |
| 10741 | gtgcttttcc cacaactgga gtttccccct ctacctccca gcctatataa atcctacccc |
| 10801 | cattttaggg ttctgctcaa ctYgtacctc ctccaagacg ccttctgtga ctaacacctc |
| 10861 | acatccaaat ttaaagggat cccttattct tctgaacttc caaagccaat agctctgctt |
| 10921 | ccaaagggca gaaaatgtct ctattctcca tgactttata tatttgaaga tcttaattga |
| 10981 | attcttctgg actccactct ctccatctgt gaaatggcca acagctgtac tgggatgaac |
| 11041 | ctcagaacct cttcagggtt tcattagaat gtagaaaaat gcaagtagcg ccatccctcg |
| 11101 | gcttccagaa gcttcctcac tgtctggagg ctggagcccg ggtgagagca gggcacccca |
| 11161 | gggttgtggt taacttcaaa ggacacaggc catatctttg cacctatggc tacttctgcc |
| 11221 | tggaggctct cccaggccct gaccctttct ctgcatgtcc attccctgcc tgcccttcaa |
| 11281 | gtacgtcttc ttcaagcact tcttttccac aaagtctttg ctaatctacc tcaactggaa |
| 11341 | gttgtctctt ccctcgtgca gccctgtggt actttccctt tctgtgacat ttaaatgcat |
| 11401 | tttcctttac gttacatgcc tggcatgtgg tagacatcta atcacgtttg ttttcttggc |
| 11461 | tgggYgctgt ggcgcatgcc tgtaatccca gcacttaggg aggccaaggc gcgtggttca |
| 11521 | cttgaggtct ggagttcgag accagcttgg ccaacatggt gaaaccccat ctctactaac |
| 11581 | aatacaaaaa ttagccaggc atggtggcgt gcacctgtaa tcccagctac tcaggaggYt |
| 11641 | gaggcaggag aatctcttga acccgggagg tggaggttgc agtgagccaa gatcgcacca |
| 11701 | ctgcactcca gcctgggcaa ctgagtgaga ctctgtctca aaaaaaaaaa aaaaaagaca |
| 11761 | tctacatgtt tgttttcttg aatagttcat ttggaacatg cctctttttt ccacccttta |
| 11821 | tcccctttat ggactataaa gcccttgggg gcaaaatctt gttttcctca tcactgcatc |
| 11881 | cactgtagag acttccttgc atacaggagc tgctcggaaa ctgtttgtga tctggcccca |
| 11941 | ccccctagtt tcagctctgt tctatttggt gattgttgaa actgtttgga tggcttatga |
| 12001 | gcctttttca aaataaagtt ttatatcaaa tctcaccttg gcccccacca gtgcagaaat |
| 12061 | cctggataaa attagatata gctgttggaa tccccaggga gcaagcaatg agggcttttt |
| 12121 | ttgtcatgct aaaacccgtc agtggggcaa caggaaagct tttgaagagt tatcaaYagg |
| 12181 | ggagtgatac gatcagattg cagtttagaa agatcttact agctgctatg taagagtaga |
| 12241 | tacccagtgg gggagaggtt cattcaagag gcccggggac cagttaggaa gctgctatag |
| 12301 | ctatccaggt gcgtgatgat ggtggcctga attacaattg cggcatggag aaagaaatgg |
| 12361 | gtcttgctcc catttaagca tcattgatta gatggggaga gtgataggga agaagccaag |
| 12421 | gatgccgtct gggttgtggc ttggtcagca agccagatga tacagccacc caatgggaca |
| 12481 | tgggaggaag agcagactca tgggagggag agggcaacct cagctataga catgttctac |
| 12541 | agatagggat gacctggagg ctgttgaaga gagcaggaga gaagtctggg cctgagatat |
| 12601 | ggaYttggga ttcattgtaa ttagatggca agtgaaggtc ctaggagagg aagcccagaa |
| 12661 | tgtgtgagag caaatgtctt tgaccttgtc ttcatggaga agtgtccatg aaccccttga |
| 12721 | aatgatacac acaattttgt acataggtag aaatgtacat ttttctatgg aaagagtaag |
| 12781 | tccgtagctt tcattgaatt ctctgaaaga tcaaggaccc aaaagagttt actgagaaga |
| 12841 | aggccaagag tttactgaga agaagtacac ttggggtact ccaactttac aggacaggca |
| 12901 | gagaaaaaaa gactgaaaag gaacagtcag agaggtggga tgaagacgag cacactgtag |
| 12961 | tttacgccaa aacagttaca tcattattgc agagccagca taagctacag gacaatttga |
| 13021 | tttagggata atacaaggag aaacaagtta ggatggagac agaaaacaga caggacttgt |
| 13081 | cagaaacagt gttattaatg ccttaaaaac agtaataacc cctactacag cagtgacatg |
| 13141 | ggaaatacaa ataggtagaa tatcctggat tacaatttcc caaaggaaaa ctaggcatct |
| 13201 | gagagtttaa gtgcattttg catgggttga ccactgtcta gcaccatatt ctcttctctt |
| 13261 | ccaccaccaa gagcccccag cttatgctaa ctctcatgac aaacacaatt ttagtacctc |
| 13321 | tcactaccaa ctatccagga accaggaatc acctattact acRgttccag cagaatggga |
| 13381 | atcccattct cggatatcca gggtaaatcc ctgaccatgt gagaggaatc ctagtgcccc |
| 13441 | aacaacctca cccSctgact cctcctcaaa ggctctgcca agtcaacaaa aaaatcctct |
| 13501 | acatttacac tatctgtaaa gccaaagacc agcgtcaacY taaatgtcca tcaataaggg |
| 13561 | aatggttgga taagtaaaaa ttatgcagct gtaggaagga atgaagaatg tctatatatt |
| 13621 | cctccagatt aatctctaag atattcagag aaaacaagca agatggagaa aacatatata |
| 13681 | cttgttacca tttttcatgg attcatatat acacacacat gtttacattt aaacaaaatg |
| 13741 | gaaagacaaa tcatattttt tagtggttgc ctatatgcag agtgaaggaa tagtgtggaa |
| 13801 | gaggtaagta gagagctaca tttctttgaa tataatgttt ctttataaat ttgattttag |
| 13861 | aaccaataaa tattttacac agtcataaaa caaaatttaa atagcaatat gtccctaaaa |
| 13921 | aaMacaaaag aaaaatgagg caaatgaatt tggttatgta tccaattggt agcataacca |
| 13981 | cacagagaga aactattcca tctgactata aaacaattaa tttgacaata catccttagt |
| 14041 | aggacatacc ttaaggtcat acataaatgc agatctgcat atatatgtgt gtgtgtgtgt |
| 14101 | aatgttcagc aattatatta ttggtttaaa tattggaatc aatattctga gactgcttta |
| 14161 | tgtgcatcaa atgagtaatt atgttggtat tattgaagag caagattttg taacatggtt |
| 14221 | gaaagaaaat agaaatgtag gccaatgaag ttaagtcaaa agtcagtagt tggttctaag |
| 14281 | tatgaactgg atgcatcagt ataaattcat ggtgtagtgt atctttaaaa caagcaaaaa |
| 14341 | atattttcta cctctgtcca cagaaagtgc tccaaaacaa tgactaacag caaaattagc |
| 14401 | acctctagca cccatattat gttctctaaa gaccattgcc cactaaaagg aattaggagt |
| 14461 | cctgggagaa ataagtgatt ccaggtctgg agcataaaat gtataaRtat atttacatat |
| 14521 | tacaaagtaa ggaagctatc aaatactatt aggattatgt caaaaggact caggatccaa |
| 14581 | cctgaatatg ttaccactgg tcaaagatgg gacaatttta cctataatgg attataacaa |
| 14641 | ataaaatatg tttaaaatct taagttcata aacatatttt ttaaaacctt agtcaccttc |
| 14701 | agaagatgct agagaaacat cacactatat ttttatttat ttatttgaaa taattttaaa |
| 14761 | cttagagaaa agtgcagaaa ttatgcagag aattgtactc actgtgccct aatattaaca |
| 14821 | tattatatta ctatagcaga attacgaaaa tcagaaaatt accattggtg taatactgtt |
| 14881 | aactaatcta cagactttat tttaatttct ccagttttcc cacctatgtc tctttttttt |
| 14941 | tttttttttt tttctgagac agagtctcac tctgttgccc aaactggagt gcagtggtgc |
| 15001 | catctcggct cactgcagcc tccttctccc gggctcaagc aattctcctg cctcagcgtc |
| 15061 | ctgagtaact gggattacag gcatgtgcca ccatgcctgg ctaatttttg tatttttagt |
| 15121 | agagacaggg cttcaccaag ttggccaggc tgttctccag cgcctgacct caggtaatcc |
| 15181 | gcccgcctca gcctcccaaa gtgctgggat tacaggcgtg agccaccacg cccggccccc |
| 15241 | aacctatgtc tctttaccag ggatccaatc caagatccct cattgcattt aattgttgtg |
| 15301 | ttttctcagt atccttcaat ctgtgacagt tcctcagttt ctttgtcttt catgagcttg |
| 15361 | acactttcaa aaaatccaag ccagtgattt tgtaaatgtc actcaatttc agttggatct |
| 15421 | tttctcatga taagatccac atatgcatac attttttagc aagaatacca ctaaagtaat |
| 15481 | gttgtgccct tcttggcgca tcatatcggg ggaaattgag gccagtacgt cttattactt |
| 15541 | gtaatgttat ctgtgattat atagttaagg tagtgtctgc catttttttc actgtaaagt |
| 15601 | tactgttttt ccctttgtaa tatactaata agtaatattg ttggggagat acttggagat |
| 15661 | tatctcctca acaagagaaa taggatattt gagattatgt aaatatccta cttctcatca |
| 15721 | tacttttgcc cactaatttt agcatcaatt gacagttcgt ccttataacc ataactgtga |
| 15781 | agtgtgccca atgattattt cccctttccc tctacattta ctcattggaa ttctgctcta |
| 15841 | aggaagagct taccttctcc tctgtttact tatttattca atttttatat tagtatagat |
| 15901 | atttattttt tctttaggtt ataacctaat aatgtcatta tttttttgct caagttttcc |
| 15961 | tagatttggt cattacgggt tccttcaagt tgcttcctgt gtcctctaga cgcatgaaaa |
| 16021 | tatcctttca ttttttgaac acttccttac tttctgacac cacataatcc tccaggctta |
| 16081 | tctggcatat tttgcatccc agccctggaa tcagccattt ctctaaggat ccatggttct |
| 16141 | ttttatgaga gaatggtgtt tagaaaccaa ttccttgatg ccatgtgtct tcattgcttc |
| 16201 | tgtgttgtca ttgcttctag gccctcccag ccaacacagc taggaaataa atgtatgtgt |
| 16261 | aggtacacat gcatacatct ctacttattt ctgtctatta atatatgtgt acacatatgg |
| 16321 | ctagatataa tatgtataaa ctatatataa cacattgtat gtaaaatcat gaattcatag |
| 16381 | tgatacccac tattccaaac caatgccttc aatctagcct tccccccttt atttggttat |
| 16441 | tctttttctg actttgagaa actagactct cattagtcac aatacacagt cattagttca |
| 16501 | aatctagcat acgtagtttc agaattacta attcatatac ctatgaaaaK aaattaacta |
| 16561 | gagtacagta tttgtggtgc agttatttct gtccttagct ttacaacaca cagtcaaaat |
| 16621 | actgttttcc aaagttactt aggttattct tttcttcctc actcttcggt atagttacat |
| 16681 | tatctattta cgttatactg tttatttgtt actgttttta tttcatttta gtttttccct |
| 16741 | acatcttggt tgattttaag tatttatcta tttgggaggt atgtaaaacc ttatgatggt |
| 16801 | tgtaagagtc aaagctatac aagaaagtat tctcaaagaa gtgttgtttc tcccttatcc |
| 16861 | ctactatccc attttcattt tcccattttt ctctacccca ttctcccaga cccgtgtagg |
| 16921 | taaccagtct cattagcatc ctgtttattc ttcttatatt tcttttacac aagtgagcaa |
| 16981 | atgcatgtag gttttcttat gtctcttttt tcttacaata aggtcagcat actatagata |
| 17041 | ttctatttta ctttgctttt ttacttaata tattctggaa atcactccaa atcaattcat |
| 17101 | agacatctgc cttattcttt tttacagctg tatagtactc cactgtatgg ctgtgccatt |
| 17161 | gtttattcaa caactactct tccatatatg gatatttagg ttgtttccaa tattctgtag |
| 17221 | taatgaacaa tgctaccaca aataacctta tgcattccat catgttgcag gtatatcttc |
| 17281 | aaggtagatt cctgtaggtg agaatgctta gtcaaaagtt aagtgcatat tagctctgtt |
| 17341 | aggtattgtc aaatttccct ccccagggtt gtactaattt gtattcccac caacaatgta |
| 17401 | tgaaggcacc atttttccca tagcttcatc aacaggatat attgtcatac ttttcaactt |
| 17461 | ttgcccatct gataagtaag aaatgatatc tcagctttga gtttctttgt gagtgcattt |
| 17521 | gaactttttt ttttttttgc atctttaagg gtcattttta tatcttttgt gggttgtctt |
| 17581 | tcatgtattt ttctcatttc ctatcaggtt tctggtcctt tgtcctcaat ttttaacact |
| 17641 | Yctttttata tagggaatta gcccttaaac tgtggtacat gctgccaaaa tttcctccca |
| 17701 | gtttgtcagt tgtcttttga ctttatcatg tttttgacta tgcaaaatgt ttatgtagtc |
| 17761 | agatatacca acattttatt taattgcttc tggattttga gtcacagttt gaaaaccttt |
| 17821 | tcctgtattt agattaaaga ggaatttact tgtgctttct tctagtacta gcgtggtttt |
| 17881 | actttgtaca tttagatccc caatgtattt ggtgattatt tttatgtatg gtgtaagata |
| 17941 | taaatctaat tttgtctttt ctcaaatggc taccccattg tcccagcacc attcatttaa |
| 18001 | aagtctgtct ctgacccagt aattttagat gtgaccctta ccctatactg tatttccata |
| 18061 | tgtagttgga tctatttatg ggctttctat tctatctcag ctggtctatt tctctcctca |
| 18121 | tgcatcagtg ccacactgtt ttatctatag aggctttaca gtatgtttta atatctggta |
| 18181 | gggctagttt ccatcacagt ttgtttatca gtattttctt gcctattttt gcatgtttgt |
| 18241 | ttcttcatat gaacttaagt atcgatttgt ctaactccat aaaaaaagtt tgttgatatt |
| 18301 | tttattggac ctgagataaa tttataaatt aactcaggaa gaactgacat ctttataatg |
| 18361 | tcaagtcatt ctatccaaga tcataggatg cctttcaatt tgttctttgt gtttttgaaa |
| 18421 | agtgtttaaa agttttgttt atataggttt tgcacatttg ttgttaaata tatccctaag |
| 18481 | tatttcttct ttgttgctat tataaatgga attatgttct ctaactggtt attgtttgta |
| 18541 | tatgagaagg ctgttaatta tgtgtgttag ttttataatc tgttaccttt tatgtttgag |
| 18601 | ttagcttatc attgattctc taaggttttc cagatatact atcatataat acaaaaatag |
| 18661 | agttttatta ctttgttatc cattcttaca tctctaatta aattctcctg tctaattgca |
| 18721 | ttaggtaatg tctctagaat agtgtcgaat catagttata gagatagtga gcatcctccc |
| 18781 | ctggttccta atcttagtgg aattgtgcct agtgttttcc tcattaaata agatactggc |
| 18841 | tttagttcta aggtacaaat actttatcat gttaagaaga tatcccacaa tcactatttt |
| 18901 | taRtgttttt atcataaata gatattttaa ccacactgtt tttttaaaac tgacaaaggg |
| 18961 | aaagaatcaa gcattttttt cctgccattt ctatatgatc tacacctgaa ggtaaccaaa |
| 19021 | tgaaagattg ggcaagttta tcttcctgga attactccag caataaacaa aaaagaaatt |
| 19081 | atccaataag aatatcacta ttttgcaacc cctaacaaaa tagtcaatcc agtcaaaggt |
| 19141 | catcaataga tgctaccttt acaaaaagag aaacatcagg cattatacat cctgatgaaa |
| 19201 | gtgtacacca ccatctatga agtagtcttg ccaaaagaga gagagagaga gagagatgga |
| 19261 | gacagagttg gtgagaggag agagagagat aaagacagac acagaaaaag agacagacaa |
| 19321 | tctgaatcaa gcctctagcc ctaacaattg acaagaaatt caagagacag aggaaaatgt |
| 19381 | cagacagcac agagRtatac tcagtcaaat acagtcatga gaacttgaac aaatgatctg |
| 19441 | atttcttcaa caaagaattt aagggaggaa gaaagagaat aagatggagg gaaaagtcta |
| 19501 | tgtgttattt aaagaagcta tatgtaWgtt tatatgcacc tacagatatt taaataaact |
| 19561 | tcaaagacat atcaactaat tgcaatgtat gggccttatt tgaatcccaa ttcaaataaa |
| 19621 | caggctgtaa tagaaacatt tatgagacaa ctgaggaaat atgagacgac tggatgtttg |
| 19681 | attgtactaa ggaattattg attttttagc tatgtaatat tttggttatt taggtataaa |
| 19741 | agtaagtcct tatccttttg agatacatat gaagtagtta caggtaaaaa tgatattatg |
| 19801 | acggagacta tggagaggga ggtcatggta tttatgaaat aagattggac gtgtactgat |
| 19861 | ctttgtcgaa gctggtgatg gtttacatca attctattat tctctctgcc tttgtatatg |
| 19921 | tttgaaattg cccataataa aaaatgttct tgaaaatttt gcacttatta tatttaacat |
| 19981 | ttagaccaaa tgagatcata tactgtggaa tgtggtggaa acaatcaaat acatccctgc |
| 20041 | cataagcagt gttaaccact gtcagtctct gagccctcaa gggctaatgg ccaggttgct |
| 20101 | cccaagtgcc agggtaacag gccccagggg cctagtgaca agagtccttc cttcctcttc |
| 20161 | acccctcaaa ggaccccagc tctgtggatt tctccctccc acagggaaag ccccaaactc |
| 20221 | acatcattct ctgaggtccc acagaggata caggatttgc actctatgca ctgccacttg |
| 20281 | taggtcttga cagcctcggt catgttcagg gtaaactgca ggcaggttgg gtgacctgga |
| 20341 | ggaagccaga aacaacagca ttagggccRa agtatgaact gccacccctc aacaccactc |
| 20401 | actggaaaca cattgatgcc cagtgtgcag gcagggcagg gtagcatgac gtagggaaaa |
| 20461 | aaatggggac ccaaacaggg ccctacccac attcttcacc acccMgttat tcagatcaag |
| 20521 | ggcaaaacag agatataagc acatccaatt ctgcttgcac tRagaccata ttccccagca |
| 20581 | ggtgtaacca gttgatgaag atggaaaaca atgatcagag agaacgagag aggaaactgc |
| 20641 | agagtacaca gcctggggca gcactatgag agacaccagt gggaccctcc aagccccagc |
| 20701 | atcagctatg gcagcacaac aggtaagaac tatttggagc tgggccttct gatccaacca |
| 20761 | gttattcaca ctgccttagg gtgcaaggga ggctatcaga aggattgtat gaggtttcca |
| 20821 | gggtcagtgc tcagggatag gatgaggcat tgcactgtta cctaaagtat ccatgcccac |
| 20881 | actcatgaga ctagcaaaag ttcataWcct gaacagtacc acggactaca gaaggaagtg |
| 20941 | gcctggcaRg gatggcaaag aaatggagca tcagagcaaa tggccaggtc tatcctaaaa |
| 21001 | ggactggttc ccggttctaa ctcttttctc catcccaagt ttcatgggag ccaacccaat |
| 21061 | cacaagatga gagaagggac attaagctgt gaccttcaag cacagccccc gtgagccatg |
| 21121 | cccaagactt ggcctgtgga actggactct gtcctcagac ctaggtcacc taaaagagag |
| 21181 | atgcttgcag ggagaggacg gccatgaact gtagaatgca aagacccttg gccttctatg |
| 21241 | tggcatggaa ggataacttg gatgacattc ccaagtcKcc cagtactgtg aaacagatca |
| 21301 | gaatctgccc agaRcaccca gggcaaagcc aattactgac tctgtcacaa aaaacattga |
| 21361 | cagctttgcc cagtgccgag cactcaccgt tctccagagc ttccagttct gccaaaccca |
| 21421 | ttatatggtg ccttgtgttg cctctttcat ttgaaggatt atatgcttta aagaaggatg |
| 21481 | ctagagacag gggacaccaa tcatggttag caccgccaac ctagtatcct ccacagacag |
| 21541 | gatcccccat ggcgccacca ccccttggca aagccacatc ttaacaggag cccccatttc |
| 21601 | ctccctttca aatcttcaga gagctgttca catcatgacc atttggatga aatactgtct |
| 21661 | attcagccaa cataaggatc cttcacattt tgagctccac aaatagaaac catgctgagt |
| 21721 | tatcttggag agggcgaggg gtgtagaaat gacttgttgg tggtggggag gggacactca |
| 21781 | gtgaatacag gcagaagcag caaggagagg cctgatctaa aagcttttca aggacttctc |
| 21841 | aggtaccatc caacttagag acttccgcag ctctgaacta ataaccctct caaggtgata |
| 21901 | ccatSacagt ggccccaaag aaaaagaagc cttacattaa aagcctgtgt gaacagccag |
| 21961 | ctgatattct tgaaagcatc tcaaagattg gtctaagaag aacattagcc agggttactc |
| 22021 | cctattccag tctctcagag agaacactgg gatgggtaca gggtaggaaa tatctgtttg |
| 22081 | ggactccatg tggtatgacc acagatgccc agtttctctg accaggcacc actgagagca |
| 22141 | tgaacatgag gtcatggagc tgatgctcat ataggcaagt tgactttggc cagttctgtg |
| 22201 | ccacacccca gccacaccca gccagcttag gataactatt cattaactta cSaagtactt |
| 22261 | attgagcacc tacaaggcag gccattgtgc tagacagaaa agacacagtg gggatgagca |
| 22321 | agataccttg agcccttcca gcctagccaa agaggcctca gattaatcag ctacacatgt |
| 22381 | atctatcaac tacaattgta taattagtgc catgaaggaa aagcataatt ggccgtaaaa |
| 22441 | acacatagaa gaacctaacc tagactgaga tgacaaggaa accttccctg agaaagatct |
| 22501 | ttaagctgat atgtgtcaga tgagacgtta gctaggtggg aagaggagga ttccaagtaa |
| 22561 | ggggaacagc atgggtggag gctttgagca gtgaagcagc ttagcaaatt acaaggaaga |
| 22621 | gaaaggccag tgagcagagg cttgatgagc aaaaggaaag gggtaagagg tagctgcaga |
| 22681 | ggtagctgga gaaggattac aggcatttgc agcccttatt taagaatctg ttttttaagt |
| 22741 | cattaaaggc tattaagcaa ggcagtaagt gggtcacatt ttgtttttaa aggagcactc |
| 22801 | tttagcatga gtgctattgg gatgaagtgg ttctgtatct tgattgtggt ggttacatat |
| 22861 | gtgataagat tgcatagaac tgtacataca catacacata tgtatttgta catgtaaaac |
| 22921 | tagtcacatc tgaataaagt Ytatgattgc attaatatca attgcctggt tttgatattg |
| 22981 | tgctataatt acataagatg ttgcccttgg agaaaactga gtgacgagct caaggacttt |
| 23041 | ttgtaatata ttttgtaact tcctatgaag ctataattat gtcaaaataa atagttgaaa |
| 23101 | atatattttt aaataaggaa aacaaataaa aaattaaatc atcaaaaaga aaggaaggtg |
| 23161 | gaaggcagat aagaaaaagg agagagagag gaaggaggga aggaagaaag gaaggaagga |
| 23221 | aggaaagaag caggaggaag ggagggaagg agggagggaa ggaaagaagg aaggaaggag |
| 23281 | aagggaagag atgaaaggga cagaagggaa ggaagggaag gaagggaaag aagggaagga |
| 23341 | gggaaggatg gagggagggg aaggggagag aagaggggaa ggggatggga aggagagagg |
| 23401 | aagaggaggg gaagggaggg gaaggggagg ggaaagggag aggggagggg gaaggacaag |
| 23461 | agaaggggag gggaagggag gaaggaagga tgaaggggct gtacgctaag gaaagaattg |
| 23521 | ttgaggggtg ggagggtaca gSaatgtaag aattgttgcc aggaagctag ttaggaggct |
| 23581 | aatgcagcta ccaggagaga tacaagaatg attcaactaa ggtggaaatt tgagaaatgt |
| 23641 | taaagaaata cttgacagga cttgactatt gtttgaatgt tgggaatatg ggaaaatgat |
| 23701 | gagaaataat cccaagttct gacccatgaa actaggtaga ttgtagatta cagtgaaact |
| 23761 | tagatgagaa agactgtaga aggattgcag ggaccacata gaggaagagg attccttctg |
| 23821 | tgttgagcat gctgaaactg agaattctgg tggaaatgtt gagtggatag ttgaatgtat |
| 23881 | gggtcgaaat tcagaagttt ttgctaaata ggtgataagt gaaaccatga gaattaatga |
| 23941 | aattatctag ggaaaaggga atgaggaagt atctagggaa agaaaggaag aggagagaag |
| 24001 | aaaggagaat agagaaaagg gtctaggact gagcttggag gagctcaagt cctccaagat |
| 24061 | caaaagaaag aaccagcaaa ggaaagagag aaacatggca agaggtaaga agcaaatcgg |
| 24121 | gtgagtatgg ggtcacagta accaaaagaa gaggtttcaa gaaggagaag gtggtcaact |
| 24181 | gtgtttactg ccacaggttc tctagtttgt ccttgctcaa taaagacccc gagtgaggga |
| 24241 | atgttgacag atcagggcaa aagctaccct actaataata acacgcttca gtcatgccat |
| 24301 | cttcccaagg aaggaaagtc agcacattcc agagcatgac agaactcagc agccaaatgt |
| 24361 | gcatctgagc tgtctctgtg aggaggggcc gggggtggcg tgtgctgcat gcatgtagca |
| 24421 | acactccacc aatatttatc gagagccagc tctgtgtctt agttctctaa gactcctgtg |
| 24481 | ctgagctatg aagacatttt ctgggatagc tttggacaat ggatggtagc aagtgggttt |
| 24541 | tggaaatgcc tgttggaagt ttctgaaaca atctcatggc tttctctgtg ttcccatctt |
| 24601 | gagaaagtca tcagcctcct gaagatcttc aaacccgaag caagggagct aagttcacac |
| 24661 | agcctcaagc ccccgaYaaa atgcaggact aagatgggcc ttagcagtgg ctgcaggaac |
| 24721 | tccttctcct ccacactcag gacatcactc aagcgcaaga agaaagtagg ggagggaaat |
| 24781 | actattgtaa cttctcagcc agggagggtg agacacaaaa agtttaagtc atcagcaggt |
| 24841 | gcaaaaactg tgcccagaac taaatcctcc tgtctggacc accataacag atttgctcct |
| 24901 | gcgcctttct ccaaaaactg cagaaatcat ttgccagaca aaactgcaag aatgagactt |
| 24961 | cttacctgcc acaaaaatta cttcaataat acacactgtt agacaaaaRg aagtgtctaa |
| 25021 | ggaaagtaat agcagcttgt ttctaaggtt cactggtctt acttttgccc agaactaatt |
| 25081 | cctaaatgct ttgaaagtaa gagaataaca aatacggtct ttccaattca aaggtgaaag |
| 25141 | aaaaaaagag gcacatggct ataaggtaat ttgtaatact tatggtcact tgatatttga |
| 25201 | ggatccctat cttaatctct tttgtaaagt taaccctcat tctctagggt attaggctgg |
| 25261 | tgcaaaagta attgcagttg ttgccattaa tggcaagtac tgcaattact tttgcaccaa |
| 25321 | cctaatactt gcttggaaat ctagattttt tcatagcccc agttttcttt agagcaagaa |
| 25381 | atacccatat tgctatttaa atagcctact atagtggagg gaagacaacc cttcccaggc |
| 25441 | ccccctgggt gccatgattc aacagagcat ttataagatt ccaattacca aaatgaattt |
| 25501 | agaaaatggt gcactgtgca tgattcagcc cagccggatc attaaaaacc tagtccttcc |
| 25561 | cggatgttcc tctaaatgta ttctatcagg agcattcagt aaatctcctg ctagcttRtt |
| 25621 | gagctgggtc agtggtgaac ttggtgtgaa gagccattcc tgattcagcc ctaacccttc |
| 25681 | cagaactgac ctcaatcctc cctagaggtt gacactgggt atgtcaccca tggccactat |
| 25741 | gtatgggaga tctaactgct ggagtgggct tttgggagat cagcatttgg cttcagggtg |
| 25801 | ctatttcagc agatggaggg aaagggaaac caatgggtta tgggaaactt ctcagacaga |
| 25861 | tgataatcca tgaggctggg agtacccggt gtttctgaca ctacagccta ctgagctcag |
| 25921 | taaaaaagga aaggcaggca tctgagagca gtgacagcag ccttggcact ggaaggacac |
| 25981 | atctcatgtc tttacagaaa catgtgcaca gatgctgaaa atgttcaagg gacagcaaat |
| 26041 | gggatttgtg gtatttgagt gagaaggcac acagataaat aYccaggcaa aactagtgtt |
| 26101 | agtttcatat tcacagctgc caatttctat gcacgMtaat acacaactgc cccaacacaa |
| 26161 | gggtatttcc agccttttag gggagaaaat atctaaatat accttgtgga ttaagctgac |
| 26221 | attatgattg caacttaaaa gctaacctaa gtcacttact agtcaacctc ctctatagat |
| 26281 | attcagtaca ttgagagaaa cacagttcat tttcaacaaa ccctgggcaa aagaaataca |
| 26341 | caaactgcta tgacatgtgt ctcttacatt atgatcctta ttaaaagagt ttttatttta |
| 26401 | ttatcaccgg tatttaattt ggactaggct aagccacatc actgattgaa ttagggctcc |
| 26461 | aggaaaaaaa attatcttcc taggtatgca Ytgaaaacat aaataaaaca aatataaata |
| 26521 | actttggaat cagcatggtc tattatttat tcattgtgaa attataaaca tctaattata |
| 26581 | ctttattacc ttatttatca atgttgatct cttaaaagct aatttctcag gcaaagagaa |
| 26641 | cttaaatatc catggttctc aggcaagtaa atgcaaaact caaattgtgc tccttattct |
| 26701 | gatgcttggt ttacagaaat tgtattacat aaaatacata gaatcaattc caacccaaaa |
| 26761 | tagcgccaaa aacaagtctc catgggcatt cattagaaaa taatttggct caaatttcaa |
| 26821 | atagttctct atattctcat acacatataa aattcctggt atttacaaat tgcaaatgta |
| 26881 | tatatgaagt tttagctaaa gcatttatgc aaagtatagt catatctgaa tcatcatgct |
| 26941 | acagggtaat ttgagaagaa aaattattac tagttctctt tgggaagcca tctcattcaa |
| 27001 | tcagatccat tcattttcat tctctcactc ctctcttctc tctttctctt ctctccctct |
| 27061 | tctgtctctc tctctgcccc attccctccc cctctcttca tgctcctcca ctttgagacc |
| 27121 | cagcttggca ggtggagaga aggaggctca gtcattatat tgaatctgta aaggggaaag |
| 27181 | ggatggacca attctgagca atcaaaagtt caactccttt atgtatatac tatggcaagt |
| 27241 | atgataactg ggcactgctg cttcacataa ttatttctca agccctgctt tgtaaacctt |
| 27301 | ctgcaaaggt ctgcaggttc acctctatct gcccccagat gttacttcta atgctgaaga |
| 27361 | cacctgcaaa tcgatgatca caatggcact ccagaggcat ctgaatggct ccctttttct |
| 27421 | ctcaccattt ttattgcact tcaaagagga caaagaagag aaagagaatg gaaaggacaa |
| 27481 | ataccaaaca aacaaaaatg cattaaaaat aaatgatagc gtgagctgtg tggctgccct |
| 27541 | ttcttgggca aaacaccttc ctgtgcatcc agctccactc ctcttagagg tttgtttatc |
| 27601 | ctctcctcca gttgtcaagg tctgtggcac ccaggaaaca catgggatgc aagccccagg |
| 27661 | ggctattgca ccagtcattc ttataaataa ccatacaaag cacattcatg caagagtatt |
| 27721 | acgggcactt ttaataggct aaacagccaa gggctcatgg cgccattctc aaatggtcct |
| 27781 | agaaattccc caagttttcg tggtcaggtg tggtccaagg tggagtctct aggaagtgga |
| 27841 | tctacacctg tctataagcc tgagggcata catcatggtt ggtcttctta aagtgaaata |
| 27901 | atgggatagg gaagccttga cctggattta tacaatttac tcgactcaac ttggggccaa |
| 27961 | tgcacagcac taggaatacg ttgagagtca tagtaatgac cccaaagccc ctaattagtc |
| 28021 | actgcagctg aggatcaaaa ataatttatt catttattca ttcctttgac agtatttgtt |
| 28081 | gaatatataa atatggcagg cactcttcca ggtactgggg atatagcagt gagaaaatcc |
| 28141 | aaacccctgc cctcaattta caactgccac actttgagat atattacagc acctgagtcc |
| 28201 | tttggacaag tcaattgact tctctagcat tagtttttca atatattaag ttaaagcatt |
| 28261 | ggaatctgct atccatgaag ctgtagcttt gtctatgcca cccaaaaatg gtatttttaa |
| 28321 | agatactact gatccccaat tgcccatctg cttggtggga taaacaagcc ttctaaagtt |
| 28381 | tgccagctaa aactgaaagt taaaaaagaa aaaaactaag aaagaaatta aaatagccag |
| 28441 | taagtccttc tagaattcat gtcaactttc ccatattgac cagcccagtc cgatccaatg |
| 28501 | tcgacacaac aaaagatggc caagacagaa agcaaaagaa atctagaaat ctaaaggact |
| 28561 | tttcatcaac cataccaccc accgccatgc aataagttag gcctatacag atgagctgtc |
| 28621 | ataaactgaa ggtagacaga ggccttgggt aaggttccat cgatgaggaa tattagatct |
| 28681 | gggatgagct aggttgagct gctgtgtgac agctgcagat attgccaggc aggaagtgac |
| 28741 | taagagaaga gggtcatcgg tatgagcaac tctggatgac tttcctttta aatgcttctc |
| 28801 | tggatttgta gattgcaggc aaccagctgc ccaaagtgat tcttgcccca caacagtgtg |
| 28861 | tgaaggtcag gcNgctgaat cattgYccag agcccaacat caattttaga tgccaagcct |
| 28921 | tgacatttgc tgtgcattcc aggcctctct ggacctcagg agcatccaac catgggacct |
| 28981 | ggctaaaggc tctgtgtttt ctttaggaaa atgagcctga aaaagaaacc attgcttaga |
| 29041 | ttggaaaccc tgtaatccct gtacttccta ctgtcctgag tacatccagg agaatttcaa |
| 29101 | aatgNNtgta attgatgtat agctggtgga aaacagcagt gattggtcaa cacttgattg |
| 29161 | cccatgatcc tccaactgct gatcatccat gaattagaag atgaattcat gagtggtcta |
| 29221 | agttcttgag ttgcctgagg acctttgaag tagcattcta attttttctt ccaaaaaata |
| 29281 | ttccacagag ttgtgctaag tcaaaaggaa aaaatgcttt cctatccttt tctacgtgag |
| 29341 | cctgggaagc aatcatagaa gtacctagaa gtagaggact gacagtgtac tcatgacact |
| 29401 | tagacacttt gttttacatt tttttttttt tttgagacgg agtcttgatc tgtcgtccat |
| 29461 | gctggagtgc agtggcgtga tcttggctca ctgcgagctc tgcctcctgg attgacgcca |
| 29521 | ttctcctgcc tcagcctcct gagtagctgg gactacaggc gcccgccacc aYgcctggct |
| 29581 | aattttttgt attttttagt agagacgggg tttcaccgtg ttagccagga tggtctcgat |
| 29641 | ctcctaacct tgcgatctgc ctgccttggc ctcccaaagt gctgggatta caggcatgag |
| 29701 | ccagtgcgcc atttttaaat cattttagtc taattttgag tgttcttgtg gactttgcaa |
| 29761 | tctacccaat tgtgatcaga ttctcataga aaaataattc cacttaattt ggcaaaattc |
| 29821 | actgagcacc tgttcattgc caggaactgt acaaggtgct gaagtttcaa agaggaatga |
| 29881 | ggcatgactc ctgccttgag gagctcagtt tggtaggtgt gctaggcagt ctctggcgtg |
| 29941 | gctatcaatg aaggacacca tactcttttg tcattctccc cccttgagtg tgggctgcac |
| 30001 | taaatgactc acctcaaact agtagaatat ggcagaagtg atgagatgtc acttataata |
| 30061 | ttaggttata aaaagactgc aactttcatc ttccgaatcc tctcttatgc tttctcactt |
| 30121 | acttgctcta agggaagcca gctgctatat tgtgagatgc cctacagaca ggtccatgtg |
| 30181 | gcaacatatg aaggaaggcc tcagtgcagc agcccaaggg gaactgaatc ctgccagaac |
| 30241 | ccacacgtgt gggcttggaa ttgaattatc tcccaagtga gccttcagat gagaccacag |
| 30301 | ccccagctga caacttgact gcaacccaag ggaggccttg ggccagaggc acccagataa |
| 30361 | aacacacata gattcctgac ccacagaaac tatgagataa taagtgtttg ttgttttaag |
| 30421 | ctgttgagtt ttggagtaat ttcttacaca gataactatt atatatagag agagagactc |
| 30481 | ttttaaatga ctataataca atgtgataag tgccataata ggagaatgaa tgaagttcct |
| 30541 | acagataagg aagcaataaa taatgctgga gaggctcagg gaaagccact gagaggaggt |
| 30601 | agctttcaag ctgggcctta aaggataaat aggagttttY taagtaaaaa aaaaaaaaaa |
| 30661 | aaaaaaaaaa aaaaaaaaat ggaaacagca ttacagggaa aggcaacagc aggaaatata |
| 30721 | aggtgcatgg tccactcagg caaagcagag tagctcaagg agagcaggga aaagaggaat |
| 30781 | tgcaggagat gatgctagaa Rggtatgagg aaagattatg aagagcctct tatgtaggca |
| 30841 | tgaggatctg aatttaattc tgtaaacagt ggggactcct cggaggtttt taagcaagaa |
| 30901 | actgatgtgc ttgtacccat gctttagaga gatgagtctg gtgataggtc agaaggcaga |
| 30961 | tRtgttggag atggctgggg aagggggacc agtcactaaa tccatctatt caatgagttt |
| 31021 | gtattgagca cttgcaatgt gccaggtgct gtgatagatg ctgagcaatg gaaaacagac |
| 31081 | aaaatcctac ccttctggag cttacactgt aatgaggggc attagtccag ggcagatcta |
| 31141 | ataattgtgg ggatgaaagg aggaaacatt tgagaggtag aattggtcaa taggacgtga |
| 31201 | tacctgcttg aatatgtgtg tgaggaagag gcagaagtaa aaaatggcat caagattcct |
| 31261 | aggttgggcc acagagtaga tgataaaact gttagcagag atgcgacttg cagagtataa |
| 31321 | caatggattc aaactgggca cattccatta attgtgcaga tgaagatgcc caggaattgg |
| 31381 | tgtgaaaatg tgggtctaca ttcaggagac aagaccaggc tagagatata aatttagaaa |
| 31441 | tcatcaggtt tgggtggtag atgaagcctt ggaagttggt gagacattca ggaagagacc |
| 31501 | acagagcaca aaataaaaag gacctagtta ggggtagagg gaagagtaac cattggagtt |
| 31561 | gaaagcgtta aagagcacca agaagagagt ccactgagaa agctggagac aatgtggtca |
| 31621 | gaaagggaga agtatctgga gagaggcacc tcatgacatc cRaggaagag gaagggtggc |
| 31681 | accaccatca agtgacagat gaagtaagat aagaaacaaa gagaacgtgt tgccctgggt |
| 31741 | gagccattgg tgatgagaac taacacagtc actagtagca atgggccctc atgcctctcc |
| 31801 | aaatcactga tggcttcagc agcgcagaga gaagaactca tacacagatg gcctcacaac |
| 31861 | atgcttcttc tgccgcaggc tttgtccagc actctcaagc ttggaagcac cgtgcacaat |
| 31921 | gatctcagga acattgtctt tacctaactc cattcactca tagcaggaat cattttctga |
| 31981 | tgtagattct ggggccaaag ctaggccctg ccagcctcag tttctgtcct tcccccggcg |
| 32041 | atgaatcaaa tcccactgga agccgtgcct ttctttctga ccttggatcg aagatcttca |
| 32101 | gtcctaggtg actgagcctt gcccacaagg ctggggcagg tcctgatgga ggcttctccc |
| 32161 | acagccccag agtctgatca agtggcagtg atgaaaattc tccaggaggg aagttggggc |
| 32221 | caaaggtagg aggagcagca ctgggagcca aacggaatgg tgaggtgagg acagaaatgg |
| 32281 | tggcaggcag caatgttggt ggctgcagtg ctttgcaaaa atgcccacaa attccttggt |
| 32341 | cctcctcttt tcaagaagtg gaggctattc ccctcttctt gaatgtagac tgggtttaat |
| 32401 | gacttgcttt taacaaacac agtaaagagg agtgacaata tgcagttttg gagactaagt |
| 32461 | tataaaaggc actgtggttt ctgtcttgac tgtgcactct gtctctatgt ctctgtctgt |
| 32521 | ctccgatcac tcactctgga ggaagccagc tattgtgttg tgagctgcct catggaaagg |
| 32581 | cccacatggc aaggagctga gggaagcctc tgttcagcca gcaaagaact gagactctca |
| 32641 | acgcagcagc tcatgaggac ctgaggccta atggcaacat gagagtgagc ttggaagtga |
| 32701 | ctccttcagc cctgatggag ctttgagatg cctgcagcct tggccaacat ctggactgca |
| 32761 | gcctcatggg acaccctgtg acacaccacc cacccaagcc attcccaggt tcccaaccct |
| 32821 | cagaagctat gagataataa atgtttgcag ttttaagctg ccaagttggg ggataatttg |
| 32881 | ttacacagca atagctaact aatacaatgg caaaggagga acagtaaggg gcctggctga |
| 32941 | acaccagaca tttgacagaa ctcctgctta ggcagtgtct gcattgtgct cccagccaca |
| 33001 | gtgaggccca gcactgggct ggacaatgaa ggagaggagc agggtttggg attttagatc |
| 33061 | atttatctct tccatgctgt tattattttt tttcagtgaa tctcctttaa aagagctaat |
| 33121 | agtgggaaca aagataattt cagtggcaat atgaatgggt gtgacccctc agcatttaca |
| 33181 | gcaaggtgag tgcatctgcc ttcggtttcc tgggtccaac ttgtttccat ggcatggccc |
| 33241 | gaggagactc actgcaccaa agagcctgcc gtcttcccct caggccttgc cctccatgcc |
| 33301 | cctgtctcac tctcaccctg ctctgccttc cttccacctg cctgagcctc tctcacctcc |
| 33361 | aacaagcctc ccctttaggt tccccagaac acaaccccag tgttagaaag tcagaggctt |
| 33421 | cctagaagta agccaaactg atatgagcag aggaagaacc tgcagctagt attctggcct |
| 33481 | aaagaaagcc atgtttggat actttaatga tccttataac ttttccaagg aagcaccttt |
| 33541 | ctattgactg attttgtttt gattccccgt ggggatcctg tgaggtgggc agaacagata |
| 33601 | ggaacattcc tgatttacaa atgaagaagt tgaggctcag aatggctcag gcagcccgca |
| 33661 | agtaagtagt ggagccaggg ctagtggaac atccatgtct tcacattcta atcctttggt |
| 33721 | ctctcactac accatgtcct aggatggcca acccaaaagt ggcaacccaa tggcatttca |
| 33781 | gctccttgtt taagctgcta aatatagcaa cattttctcc ttgcatgcat aagaagtttg |
| 33841 | ccagggcatg atgaaatatg tcactgactc tctccatgcc tcagtttcct ccatttgcac |
| 33901 | cacataaggg tgaactagct gtcccctcag gcccctttaa gcctcaatgc tccatgcctc |
| 33961 | tagcgaaatc cctcaagaag ccagacttgc ttacatgagg cagaggactg agtcctcacc |
| 34021 | atctggcagt gactaatcct ggaaaaccct ggggaagaat tgctcaggag tgagccagtc |
| 34081 | cagcccacac aaaggggcct ggaggctgca ggaagtaggt cagcagccta tggtggtgtt |
| 34141 | actgggcttc ggctcctgac agaagctcct cagcccctgg ctggagtgag gaggggtcat |
| 34201 | gccccccgcc acctcacagt cccactcaga cttgccaggc cagctattcc cacttgcagc |
| 34261 | tgggtgtcca ggtcctccct agggctcccc caagtgaccg cccatcacca gctttccctg |
| 34321 | tgaagcctct gagaggagca caaaagacgg ctggcatcca aagccaattt cacRccacac |
| 34381 | ctccattaca ctgtcagtca agaaaggaca gaagtgttcc ccactcacct tgtctaagaa |
| 34441 | aggaacaaaa gagcacacag gaaggatccc ctttttgtca tcacaagact ataYtacaat |
| 34501 | Sgagacaccc acaaccccac ccccactgga gaccccaacg aagSctcact ggctcctttc |
| 34561 | aatccttttc cccctttcat tctccacctc ccgatttccc caagtcatga attcactttc |
| 34621 | caagttgcag tggcaggaga atggaaaatg aggatgatga tggtgacaac cagctttccc |
| 34681 | tgaagtctct cacccaggtg tcttgagccc tggagacacc tgatgtcctt caacaccctc |
| 34741 | aaaaagaaga aacagcaatt gcactgagcc aacactgcat acgggagaaa catccttgga |
| 34801 | gctccatggg agtacaacaa aacccggcac catctggcgt cgtattacct ctgcatgcat |
| 34861 | ttgcttccaa gccccaacat ccaggcagca ccgggtctgc actcctcctg tatctgtgat |
| 34921 | cactaaaccc aactgataga tctgtttcca tcggccaaat tttcatctaa gattcatcca |
| 34981 | cttttcctga caatcaaaca aatatttatc caacaaattc ctgaatgaga attgatctcg |
| 35041 | ctgcttactt agaaagctag aggggatgat ttttacatgg gctttctttt tttcctctgg |
| 35101 | agaaattaga gagttggaat agtacaagag aaagcaaatc aatggctatt tccagtgacc |
| 35161 | agcatctgtc ttcaggttta atagaaatga tgccctaaga catatagtct atttggccta |
| 35221 | ttcaatacaa aaacacccat caatattaaa gtagtgcagc aggagggcct ttcctggtac |
| 35281 | tttgtaaggg tagacaagag cctcacaagt gttcaaagat tcacgaggcc cttctggata |
| 35341 | agcagtgaca aactccattc cataatcaga gaaatgaaac catcaaccat ctctaaaatg |
| 35401 | gctctggttc acctgagcat taggtgtgag agaattagga atacatcacc agaaatctga |
| 35461 | cctcctttca gggatagcta aatatgtggc acRtatacca ccattctatc ccatacccag |
| 35521 | ggcagacatt actaatcaat tcaacattgt cttccaatct gcatggataa gaccttatga |
| 35581 | tccttttcag cacMgcactc caagtggctg tcactggtct agagtttgca tacaagaaga |
| 35641 | aaccaacttg ccatccctga gctaggcact attaagctga ataggttaaa agtttcatgt |
| 35701 | gagaattaag gactcacatc ttaagcaggt cactggtcag atatataact tctgttttcc |
| 35761 | tttccatgag gcagaaactc tatcacaaca gctaagaccc aaaccaaatg gtggccatgt |
| 35821 | tttgtggttg gactcaagta ttgctacggt cacatacttc tgtcttcaaa gcaaacagag |
| 35881 | atgctaagaa gggatttttt Nttttttttc agagataggg tttcactctg tcacccaggS |
| 35941 | tagactagag tgcagtggtg caatcttggt tcactgcacc tgccgcctcc ttggctcaag |
| 36001 | caatccttcc tcctcagcat ccacgtcccc ctacctgcct cccccagtag ctgggactac |
| 36061 | aggYatgtgc caccatgcct ggctaatttt taaattttat atagMgatgg ggtctcccta |
| 36121 | tgctgcccaa gctggtaaga agggattttt taatgatggY Kaatattttt tctactccac |
| 36181 | cagctagaag gcatcaaccc attcctcctt aagtaattcc tctgtctttc attgcctgca |
| 36241 | gcatgaagta agcttcttag cattgcaagc ctctttgctg tctggccaca gctgcctttt |
| 36301 | taagattYct cttcttttcc caccatggac cccaRcccca ccataccaca gaaaagtatt |
| 36361 | tgccRcatcc cacaccctca acgctcctac accccccacc ccccaaaaaa ccactcttct |
| 36421 | ttttgacttg cacttttgca cacaaaggtc tctcactatc tctcaactcc cattcatggc |
| 36481 | caaacctNtc aaacaggttg tctacactcc ggctacacaa aagtgggccc atcgaccact |
| 36541 | tgcatgagca tcccctgggg gctggttaga aatgcKcacc ccggatctga cctagggact |
| 36601 | gcagttttaa caagatcccc aggtgattcg catgcacagg Rtattttgag atgcacttct |
| 36661 | ctaaactcac tccctttctg ggacacccac tcagtcttca ctctctccac actgacttcc |
| 36721 | ctcctctctt ttccaccaaa aaaactctca tcaaaggagt gaatgtgtcc atgcagatat |
| 36781 | gaataaaaga ataataaact actacttcca ccttttgcct gtcctgggaa cttctattca |
| 36841 | tcctccaagt ccagtccaaa agacctcact tctgtgatgc cttctctacc ctctaacgca |
| 36901 | gataaggaaa ccaaagtcct gggaggatgg gaWatctgct tacagctctg cagcYactaa |
| 36961 | gtggagWcca cctgactcca agcccatgag tgccctcagc atcgccagtg cactgccttt |
| 37021 | acgaagtgca tccagaaaga tgcccacaac ctcagataaa agccctttgg ccactgtcag |
| 37081 | ggacaggact ccaaggctgg aaccagtaaa acaagtctga ctttgctggt ggatgagacc |
| 37141 | ccatggaggc tgctcataaa tcagattccc ttgtttaagt tcttagcccc tgatgactac |
| 37201 | tgcttaccca ggcctctcaa tctccctgaa gacctttctc caYccccttc cttcaaacac |
| 37261 | acatcccagg cacccatctc ttttgccctc cttgcctcca tgcggaattt ttcctttgga |
| 37321 | gaacaaggac ctcagagtgg aaatgtccat cactggtctt ctcatttctc caagccacag |
| 37381 | caatgccatt ttggcgaccc ggctgctctc aaacttcaga gttcagaaga attaccggga |
| 37441 | gagatgtttt aaacatgcag attctcaggc cccaaagctt ctaattcccc tgccctggag |
| 37501 | tgggtaggaa tctgcctgtt tagctagtgc cctgaggggg ctcagatgca gatggccctg |
| 37561 | gacacacttg gagaccctct gctgccagcg tctcctgggg actcttgcac atcagcaagc |
| 37621 | tgctctataa tgcagcgtgt ggaacctcag ccaagtcttc ccaccactct catcctgagt |
| 37681 | cagccttgct caatgagggc tcgaaagcct ttcctgccca cctcatcctt cttctattat |
| 37741 | gaggatcaag accatgggct atgtactact gctttgttaa gctggaaaac tttaaaagaa |
| 37801 | caaaaggcca aggtttacca ctcttctgct ttgttttggc accactaaac ctctacgccc |
| 37861 | attcccagaa attctgtatt tctttcaacc ccatagccca ttgtcgacat acccgtaagt |
| 37921 | gtttcagaca ggcctgtgat tgttgcatgc aaaggacatc aatccatact ggcctgtatc |
| 37981 | caggcacaag ctgtcttccc gatagcaatt ctccttgcca gagacctgtg ggtctcctgc |
| 38041 | ataaacagga ggtcttagct tctctcagca acttgagaca ggcaccatat actctctccc |
| 38101 | caagataaga tcttttagaa gacaaagcat ttagattatt tcctttgtag gattaaaaac |
| 38161 | aaacacaaat gcccattcca gtatttgtag gactgattca actggagtag taggaaagat |
| 38221 | ttaggataca tttaagacac ggtttccatt gtttcactat gaagctttga gtatctttgc |
| 38281 | aacctaatta gattgcacct attaaatgat gactggattc aacagcccYa gaacaagcat |
| 38341 | tacttttgat cattttctat tttagcKtct attcaactat tttaagagga atatacctga |
| 38401 | gccaaaaatc acgaggaggt ggctagcagt agcaagattg gtcctaattt attgagggca |
| 38461 | gtgaggcaga caccaYcaat tctttaatct cgccaggagc tccagtccaY ggacagtacc |
| 38521 | acttctcacc atatctcctc tcacgtcgtc actgctcatg cacctatctt agattccaca |
| 38581 | tccagccttg cacgtgtctg cctacccctc tacccctttt tcctacttac tcaacttcca |
| 38641 | gttaatacca actcttcacc tactcttggc ctataccaag cacagaaaaa tacaccactg |
| 38701 | tgctgagcag tcgtggtttc agtggtgacc acagatcttg tcattgtccc cgtatttcac |
| 38761 | tagtcgaatt attctcccat ctctctctgt cttttcaaat ctcccatatc ttatacccca |
| 38821 | tcctcacact ctccttattt agttgaaaaa tacataaaca atcagaataa aactattgcg |
| 38881 | ccaggcgtgg aggctcacgc ctctaatccc agcattttga gaggtcgagg caggcagatc |
| 38941 | acttgaggtc aggagttcga gaccagcttg gccaacatgg tgaaacccca tctccactaa |
| 39001 | aaatacaaaa ttagccaggt gtggttgtgc atgcctgtaa tcccagctac tcgggaggct |
| 39061 | gaggtgggag gattgcttga aaccaggagg cagaggttgc agtgagctga gatcatgcca |
| 39121 | ctgcacactc cagcctgggt gacagagtga gactctgtct caaaaaagaa aaaaaaaaaa |
| 39181 | aaaaaagaat aaaacgatcg catcttctcc atgccacacc cacccagctc cccgcctctg |
| 39241 | tatccctacg cttgtctccc tcctattacc gggaatgaac ggtctcagct cctaacccaa |
| 39301 | agccgactgg caccaggatc cctacctctc accctgagaa ttttgctcct gctgttattc |
| 39361 | cctcttgcat cgtcaatgtc tctctctctc tctagYagac cattcagcca gcatacaaac |
| 39421 | aagccataaa agctcccatc ttccaaagag atccttcctg accaagcatc cccctctgtt |
| 39481 | gagcgtccaa tttctctgct ccttcttctt ttagcacaac tggaaagggc cagttctctc |
| 39541 | catgcccctc ctttccacac tctcccctct ccacacactc gcctagctct cctcccacct |
| 39601 | cgctggctgc cccttcttgg tcttctttgc tgaatcctcc tcttctccct ttctcccagt |
| 39661 | tcttcctttt atgtggactc acttcccctc aatgtcttct atMcacttgt tattcccaat |
| 39721 | ttatatctcc agcatgaacc tctttctgaa ttccagactc atatatccac ttgtcatggt |
| 39781 | ggttgggaac ccgaagaata Raaagttaaa aagacctaag ttaggaaagg attttgtggg |
| 39841 | aaaatcctca tcccaagggg tgatgagtac cctgccagcc aggaggggag ccttcagctg |
| 39901 | gggggctgtg gagtctttat ggaggcagga ggtggaactc acagcaagca gaaaattagt |
| 39961 | tgaatggcac cagctttagg aactgccagg atgcactttg gatcatgaat aagtaaagaa |
| 40021 | aagaggtcat cacaggttcc agaagagtga ggacagagag aagcaacaaa gtgagaaRag |
| 40081 | gaagaaggaa ggagacaaag aagacaggat acagagaaga agggggctgg aaggagtggg |
| 40141 | tgaaagaata agaactcaga aaagagattt tggttcttgc ttattcagga gcttaaccag |
| 40201 | aattctgtct aaactcttta aaagatgcag aaactcaatt gtctcactca tccctgggtN |
| 40261 | ggggggggga ttaatgtatt agtactattg ctacaacttt atgaggcgct tcctatgtgc |
| 40321 | taggcacttt gaacacactt ccttatttac ctcttaaaac aatctgtgac tcaggtatta |
| 40381 | ttgtctccat tttatagaca aagaagctga agctcagaac agctaagtaa tttactcaag |
| 40441 | acaacccagc caactgctgg cagagacagg atgaaaacac gtatcttatt ccaaccaaca |
| 40501 | tccatgcaag taRccactac accgctcggc cacaggaaac aagcactggg aaagaccctt |
| 40561 | cccctgacac aggaggccga gcggctgatg agcaaactcc agagagcact gggctCtgaC |
| 40621 | catccggtgg cctcccctgc cagagggctg gggcaataga cacatcccca cctgtgctaa |
| 40681 | agtcctgctt tcctctccac aaccctcccg ccccatccac actccacact gcccttgagg |
| 40741 | gaaaaatgag gacccagagg atggcctggg gatgaggggg gactgctcat tagctaccca |
| 40801 | gccgtggtag ctaatctaag atccgggaat aaaggccctc cctgaatgac cccagggcaa |
| 40861 | aaccaggtca aggccacttc caaaccccRc cccgacagag ttaaaggcga ggatctagaa |
| 40921 | aggctgaaaa cacaaagaag ttaatcagct ccctgaaatg aaaggggaga aaagagactg |
| 40981 | gataaaggga tcagctgaag gaagcagcct ggcttgggag agaacactcc actcagccac |
| 41041 | gagtccacag actcaggcca gcactgcccc gggggccagg agatcttggc Ratggctctc |
| 41101 | tgctgtctgt ttccttctct gttagacaag ctctagggtc tttgcacctg acagctgagg |
| 41161 | atagggcagc acctgtggcc aacacagcct catctggagt gggtccagcc aatgctgtga |
| 41221 | ccagcggctc tctgtaggtg cacaccccat aggtaccctg gatccacaca gatgccccct |
| 41281 | ctaattccat gctgcctctc catctgcctc ttcaaggtaa aaggtggatg gagctagggg |
| 41341 | gtcagaagga gtcacaggga tgggtgagct aagaggacaa aggaggcgtc tccctccaag |
| 41401 | acaggatcag cgtgtgtggg tgggaggtat acaaaacgcc atctctcctc cacagacacc |
| 41461 | cgggaacact gcctgaaact tccaccactg atgtcgctcc agtggcttaa aaaccaccct |
| 41521 | tccaaaaatc cccagttaaa atgcaaacaa ctttcttaaa gaggatagca ctatcatggg |
| 41581 | ttcctcactt gatcaactca gacactgtca gaaccagagt gaatcttgga gaccaccaag |
| 41641 | tccaacccct tctttagaca cagaaggaaa ccaagcctct aagaggtaaa gtgacttgct |
| 41701 | cagggtacag gaagaggtgg cgcagagcta gaactgtaac caggtctcct aagtctttct |
| 41761 | gcagcatggc cctggcccct gagggaggtg gcccaggatg ggggcgggca gggggtctgg |
| 41821 | aatcttggca tcgtgctccg gggctgctcc ttcttcctgt tcagccacca cRgcaaacaa |
| 41881 | gagcccctgg ggcctcagcc agcgactgac ccctccctga ccctgccttc cggaaggatg |
| 41941 | aatgcacatc agaagccagg gccaaaatat tcctgggcac tgtctgctgt gcacccagct |
| 42001 | ctctttttcc cagcctctta ggagggagaa gtttccaaaa gggacagctc caaaggcttt |
| 42061 | cacagaaggg gagcctctct aagaagtgct cctgtgtttg ggcaatggag gYaagtcagg |
| 42121 | aagacagggg gatggaagaa gaaagtaatt ttttgaatgt cacattttca ccaaaatggc |
| 42181 | atctgggaac tttcaagatc atctgactaa taccaggttg tattcgttat ttgcaaagat |
| 42241 | ggaggtggaa tctcctttga agtagtacaa ccaaatgatg tctgtagcct tMaaatgggg |
| 42301 | taacaagagg caaagaaatc tggggagagg aaacgtgtcc tgccaggggc tgagggtctt |
| 42361 | ttttgctctc ctYctgacag tctcacagcc agccacgtcg tggtagggtc ccacagagct |
| 42421 | gcccagcatg gggcaggctg gccagagcag ctggctcttt gcaaccaccc agattgcctt |
| 42481 | tgctgggaag ctcaggctca tttgcacact ggcataactc cacgtcactg accagcccat |
| 42541 | gggcaacagg actcacagcc aggatgggtt ctccctgggg ctggcacgac tctgtcactg |
| 42601 | cacatgtgca ttttcctgat cctgggcaag ttactgaaac tttctcaacc ccagttctcc |
| 42661 | agctataaaa taggaacacc ccctacatca caggattgtc acataaggga aaatgaggct |
| 42721 | agagaacctg gggtaacgtg gaattgactc tcagtgagcc tggttccctt tctctcgcaa |
| 42781 | taaaagccgg caccacctgc tccaaaggta aagcctatgg ggaaagtctt tcccagtgag |
| 42841 | ccctgaacaa gacagagggc ccttccccac aaagcttccc aggcttggag aggcgggtgg |
| 42901 | tccccatgac tcattggtgg tggtgggctg actcatttgg ccaactgtcc ttaatttccc |
| 42961 | tcctcccatt ttgggagtcc tggagcattc gttccccaaa tgaggcttgc agccagaatg |
| 43021 | agctgtgatt agcacagcag agaccagaag gatggtgctg gggggaggcg gggtaagctg |
| 43081 | cagagagttt cctgaaatta aggcaggaga agcagggagg caaggtcttt ctccctgggc |
| 43141 | catttagcag acagagactt cctttagagc caaccttctc aacctctgct gggcaaaatc |
| 43201 | aactcagagg actgcctgca atagccctaa tatggccctc agaggcagac ctggggtgtt |
| 43261 | tatcacagag cacaccatga aatttcaaac cactatgtag gtaacatagg tgggtgcata |
| 43321 | aaacagaaca ttgccccatt gcactgaatg cacaatgaac agtgggcccc agaatgcggg |
| 43381 | ctgtaccaga tctacataaa tattacaatc tgaaggcaga tgaacaagag ggagtttgca |
| 43441 | agggttgggt gagaccacgc tgtacaaggc ccaggtgctg tatagatgat gcagaggtgg |
| 43501 | gtagggtggg aagagaggtc aatgtgaagg ctcacatcca attgtttttc ctttcctcag |
| 43561 | gaggaggatg gatattcttc tgttgtgggt ttcaattcca tgctgtcaaa taacctcttt |
| 43621 | agtccaatgc tctgccactt tcagccaggc ataagcaaga caattgtcac tgaacattat |
| 43681 | tgggagtaac atgcaatggc acatgcacta atgcgaacat cagaaggaag acccggagtc |
| 43741 | tagtctagcc ctatcacttc tgcacagctt tggcctgagt cacttaaccc ttccgagtgc |
| 43801 | tggtctactc atctgctaag tgggacaatc acttctgaca aggctgctag gaagattaca |
| 43861 | ttgagagtgc actggtgatt attcagcatg tcagggaggg cctaccactc cgggcctcca |
| 43921 | cggagtggat ggctaagatc ccctgactcc cagtgcacac tcctcacaca tggctgcacc |
| 43981 | tctttcggcc tcaggggcca gcgaggagcc taccgacaag gtgaggtgaa gagcgaagag |
| 44041 | aatcagtgat ggaaatggaa gccagcagtc agggcttgca agctcagccc ttctcaggtc |
| 44101 | ctccaagaag taaatcagct gagggtcaga ccccaaggag cttcacggcc agcaactcag |
| 44161 | cctggtttcc tctcttttcc tcgcatcaca ttcagtgacc tatcagtcta gatagagggt |
| 44221 | gctttttcaa ataaaccctt ttccaacttg tctaggagaa caatcataga ttttgatccc |
| 44281 | aaagttaaat tggcctgtca gatacaaagc tttctggagc cagccagcat ctcaggatat |
| 44341 | cccacactcc tcccaaatgc attaccaccc agcaggtagt gtcatcgcag tttctctggt |
| 44401 | ttcagaataa taactggtgg gaaatgccca tggaattgac actcagcact ttgaagattt |
| 44461 | tatcagttgg gtaaatatca cccagaagac aggagaaact ggggttctgt tacgacatct |
| 44521 | acaactagaa ggagtgctga tcacttcttt tccccataag gtctaggatc ctataaccac |
| 44581 | gacaggatca gaggcaacct ggtggtgaaa ggtagacaaa cccaaactcc ttacatgccc |
| 44641 | agttcagctg tcctcacaat catcctacac atcacatgca tcctgctcaa gagctcgtgg |
| 44701 | ccagcctcct ccttcctaca gtgccctaat gccctagtga atcaagcccc accacagtgt |
| 44761 | ggacgctcgt aacatacctg tgactccccc cagcagcctg ggatcttcct tccactccat |
| 44821 | tcacgctcat ctctgctcgg gctccaagcc tcctgggccc attcacacct ctgagcYttt |
| 44881 | gctcaggtat ttcccactct tgctctcagt ggtctgcctt ctatttgtct accccaactc |
| 44941 | tatgcctctt tctatacttc ccccgctact ccaacctgca ctggtccctt tcctgagcct |
| 45001 | aactggcact cacattttgc accaagttgg cacttaattt taaatggtct tgtcttgaat |
| 45061 | aatatgctaa ccacctcttt cacctcctcc agaacagaaa aggtgcctta cacagtggag |
| 45121 | aagSctttag agccagaaaa atccttgatt ggaaaaatca gactttacca gcaatcacca |
| 45181 | ctgcctttgt caactcaatc tctctgagcc tcagtttcca tctctgtaaa atacgaattg |
| 45241 | taatcttaat ctcaaagggc tgttatatgg ctttaacaag ttaatatcta taaaaagcct |
| 45301 | agactcagta actaatgcat agaaagtaac ccccaaaagg ttattccagt tcccctttgt |
| 45361 | ttcttttatg tcttgcagaa cctagcacat tatggcaaca caagacattt ggtatatgtt |
| 45421 | tgattcattt ataagtagta taaagaaaac cagtaactgg agggtcatta tacaaagtag |
| 45481 | cagcatgcgg tcaaaacaca tggatctatt tttcaattac ggacaaaaag ttgagatcta |
| 45541 | tggagggtaa aacagtctac tttaactaaa gaagttttca ggattacaaa ctgccagtct |
| 45601 | ctctgtactc atcactcagc caagcagaag tttcagcaca aatgttcatg ctggcaattc |
| 45661 | atactacatt ctttcttaca taagttgtct ccatccccaa actccataat atgtatggtc |
| 45721 | cacagaaagt tcacttcacg tgctaaatgt ggtacaatcc ttgctacttc tttaaatcaa |
| 45781 | acacagagca aaatttttct ggagttcttt ttaaaattat ttagaaagaa Ygccgatcac |
| 45841 | ttcttttctg aagcagaatt tttgtcattt atctatatat gtaacatata taaatataat |
| 45901 | tgtatatata attaaattcg tcttctaata agacctttcc tccccagatt ggagacaaca |
| 45961 | tagtagacaa ccatgaatat tagtgaggtc attcaaccaa aatcatgctg agaataatat |
| 46021 | ccaagtcctR tgagcaatta tgaaatccat gcaccaaaga tgatgttgga tgtggtggtg |
| 46081 | tccagtgaga tgaaaactgg agtggaattc agatggagtt tcagcagaac cattttcacc |
| 46141 | tggtggcctt ttggccttac tgttcttaca gtttcttctc actgtctctt tttcacatac |
| 46201 | ttggcatttc tctggaggaa aatgtgtctt gccactgcat tcacttttca gctcgtggct |
| 46261 | catgctaccR aaacaatgga agtcaacaaa aggcttgaga cattgcttYa gtgtgaatat |
| 46321 | aaacaagcct agaaatgtaa ttttagttag tgatcagaat acatatccgt gaaactaatc |
| 46381 | ttctccacgt ctccccactt cctggtggtg agttaggcac caactcttcc aggtcatcta |
| 46441 | gctataatgt aaaacattac agaactaaat ggggacccca agaggtcatc taacccatgc |
| 46501 | ccccaactct atgcaagaga aatgcttggc tatcagtgag ttccScatca gcctcgacag |
| 46561 | tctaaaatgc ttggtgtcaa aagaactgct tgtctatttg ttttaggcac caaggtgttt |
| 46621 | ctcctgtgct ccctggagac caaatgtaac tggtcagtgc ctttatctca gtgatacaca |
| 46681 | taacaacagc tattaagtga cccctaattc ttttccccaa gttaaacaac cccaaatcca |
| 46741 | caaacctttc cttaaagggc ttattgttca tcctgttaaa catattgtta ataagctttt |
| 46801 | ctgtactttt tggatttccc acagtctttt tccgctaatt caaacacagt ggtgtcaaat |
| 46861 | attaaataga gctgaagcat tgcttcccag accttccaca tcattcctag tttaacgcag |
| 46921 | cttggttatc atgctttctt aaaaataaac aacacaatac tcctccagct tgtgatccac |
| 46981 | tacgacttcc agatctatct cagctataat tgtgccttgc caggtgatgg ccaataatac |
| 47041 | aatcaacata atccagtcaa gcagattgat gctaaaccat tgatgaccac tgtcatcacc |
| 47101 | tctcaaaaaa gtatttccta gtctggtgta aagaaagatc aggtaaccaa acgatgtgtg |
| 47161 | tYgttcacac aatgtttaat aaaatacaaa gcatagcatt ttctaacttt tagtttgaag |
| 47221 | actctttctc ctcctggtct atgcctgaaa actaacttct gggtgaYttc atatgtgatc |
| 47281 | acagggtaga acttggagaa aatgaaacag atatttaacc tgcttatccc aaacactgcc |
| 47341 | ccttttcagg aaacttggag gtaactgggg taacttagca ataaaccccg ctgaaagtta |
| 47401 | tcctgaggtc tgaaagtcac tgatcctctc agcacaatgg agtatccact aacaatggct |
| 47461 | aaagagcatc tcttcaataa acttagcttg actactacca cctatcatga ctagctcatc |
| 47521 | gaccaccctt caggatcatt tcatgtgcaa ctagtaagaa ggtttcaatt cagtagtagg |
| 47581 | tctggcatca gtaatcttct ccaccatcca aggaagaaca tgttatctta ctggttgttt |
| 47641 | tgggaggtga agtaagaagt tgggaaagtg tgattctgaa tatgaagaat ctgagtactt |
| 47701 | aggaagaaat atatctcagc aacatcctca acattccata attaaccact ttaaggagcc |
| 47761 | acagccatta aagaatctgt gctgacccca aagagaccat ttctctaatg gcaacaactc |
| 47821 | cacatctccc aagttgggcc ccactcattg tctcctatca tttgtctcat acagatgaaa |
| 47881 | ctctaccatc tatgttcact taactcataa gacccaagtt gctagagatg aataatatta |
| 47941 | gtcatgatgt ccacaatgga gagtcgctgt tatgcattgc tggattattc atagacactt |
| 48001 | ctggtaaaca tggcactact gcagtttgga ctctgtacca aaactagaaa aactagtaaa |
| 48061 | cagctttcca aaatcttgtg gtgagatttt tctggctgtg aaacatttgt tgcatttggc |
| 48121 | catgaaatag tttacagtac tgatcatgaa atgcatcagt agcctttcac ctggtaatgt |
| 48181 | gaaattctct ttccatagtc ctgaagctta gaaaatgccc tattaccacc accaccacca |
| 48241 | cccccaactg agcagtgcaa tactctcatt tctaaattag ggatcagcaa actatgtctt |
| 48301 | gtgggccaaa tctggccaac tgcttatttt tgtaaataaa gttttattgg aacacagcca |
| 48361 | tgcccattcc tgtacatatc ctctacagct gttttcatgc ttcacccaga gctgagtagt |
| 48421 | tgtgacagat gtttgcctta caaagcctta aatatttact atctggtgtg ttacaggaga |
| 48481 | aatttgctga tccccattat aaatgataag gcaaaaaaat ttcttattca gaataacctc |
| 48541 | ctctccaacc caacaaaaga aaacaaaacc agaaaacaac catgacccca gcgagtagtg |
| 48601 | ttcgcatact taaaagccag cctaactctc ttacaaagta tactctgaaa taagatgcat |
| 48661 | acaaaacata aaatactatt tgatggcaca gtagggtgac tgtagtcagt ggtagcttaa |
| 48721 | ctgaatattt taaaataatg taaagagtgt aatcagattg ttcataactc aagggataaa |
| 48781 | tgcttaaggg gccggatacc ccattcttta tgagtgctta tgttcacatt gcatgcctgt |
| 48841 | atcgaaacat ctcatgtacc ccataaatat ctacatctac tatgtatcca caaaaaattt |
| 48901 | aaaaaatttg taaaagtcta tatataaaat acttacaagg ttaatttaaa ttaaaattcc |
| 48961 | ggaaggattt ttttaatgaa aggaagttct gaaactgatg atttagggat ataataaaac |
| 49021 | tcaaatatgg ttctagttac atggagtgat ttgggtttct tagaaaagaa gggtaaRagg |
| 49081 | aatgtgatgt aatagacaac tggtcatcaa taagaataaa ctgaattttt taaaaaatct |
| 49141 | ctaaactgta caactctacc cagagttcta aagagaaggt cttccaggta catgcagagg |
| 49201 | aaaaagaaat ggatagggga atgttttctg gtggagccat atcttgaatc atccctaaca |
| 49261 | tgtgctgaat aatgacctag ctccatccag agaccaaccc agggacccat tcccaccaca |
| 49321 | taacaatcct aagtcaggat actgctagag gcatccatag attaaggcaa agatccRctg |
| 49381 | ttatgagaat ctgaacaagg catgccaacc tcaacttcca ccttacccag actggcagcc |
| 49441 | cttgggaaaa gctgccccaa agccatctaa gtgtgcccag taggcacatg gtcatgttca |
| 49501 | gttagggcac tcaaagctga tcttcagttt tcatttttca tttatcacca acactgaaaa |
| 49561 | atggggagat ctcatcaaaa tgtttgaatt gtgacctccc ttgaaaaaaa aaaagatctg |
| 49621 | ggaaccctgg gcccacctcc tgcaggctgc atcccctgag ctgagtcacg gctgccccat |
| 49681 | tggaagcaca ggtgcttcct ggtttgagac actccctacc actcctgttg tctccctgtg |
| 49741 | acctgagact gagcctcaag ggctgttcca catctctctg gcattgtcat ttatgtcaca |
| 49801 | cctgccctgc ttcattcacc aaagatacct gctctgtcag catcggattg gcaaccccag |
| 49861 | agctaaccat ctatggtaac tacatgtttc cgagtggatg aggaacatga tttctttctc |
| 49921 | tctttttcat tctctggccc atgtgtgtac ttttgccctc cctcttggtc agtgaccatc |
| 49981 | tatagacaga aagcacatca ttcttggcct acaacccatt atcagacacg tgaaaaagtc |
| 50041 | agtccctgtc ctcatggccc actattatgg acatttgatc atcctggatc tcctctatcc |
| 50101 | ttagttattt acatggatag tacacSttca tgccagacct ctcatccctg tgagcagccc |
| 50161 | aaagatagta tatgcaaaga aagcccgagt catgaggaaa gacacactct aggtagaaag |
| 50221 | cactggccca tcagaatcaa ggtcctcttt tctagagagt aaattagagg gtgcaatcgc |
| 50281 | ttcccatgga agaagatatt ttattcctta ggtgacttct taattgaacc taatgtctca |
| 50341 | aattttgagt cactatagga agtgggtgat gtgtaataaa tatgKgaaac ttcattttac |
| 50401 | tcWgtgttca tcaaaagata cRtggataag ctaaatgcgg tttacacatg caatgaaata |
| 50461 | ctatttagcc ttcaaaagta gggaaagttt gacacatcta cgtaaataat ccttgaagat |
| 50521 | attacactaa atgaaataag tccgtgacaa aaggacaaat gctgtatgat tccatttata |
| 50581 | caaggtactt agaggagtca aattcagagg gacagaaagt agaatggtgg ttgccaggag |
| 50641 | ctggggaggg aatggggagt acgtgtttaa atggtacaga gtttcagttg gagaagatga |
| 50701 | aaaaatccta gagatggatg gtgatgatgg ttgcacgaca atgtaaatgt acttaatgac |
| 50761 | acagaactat atcttaaaag cggttagaaa ggcaaatttt atgtaatgca tatttcatca |
| 50821 | caataaaaag gaaaaaaaaa accctaagga gggcaccata ctggtgtggg gctttctttt |
| 50881 | tactgctagg aaWacttaca aagtccataa tgcaaggcat aacgtgatat tcagtctaaa |
| 50941 | gaaagatgga gtacactagc agcagcatta cagtgtcatg ttcatctcca cttggcccca |
| 51001 | ctgggggcca gcaatgctca aaggtcaaga cctggcctga catgctcacc tggttctgtc |
| 51061 | tgacctagag gacccctcag ataagagggc ccatcttcac acacaaggaa agcctacccc |
| 51121 | gggggttcca gctgacagct gcaccaaccg gcagcttggg aggctacacc aacagcacct |
| 51181 | tccaggcaat gaaaatttta acctcccacc tattctaagc acacattaaa tcttgcattt |
| 51241 | ttgtgcaaaa cttctattct tggcacaggt gtgacagcaa ccttggacag gtatactaag |
| 51301 | tcggttcaca taatcaggct ttcaatccat caattttggc catggagagg gtgatgatgg |
| 51361 | tgatggtgat ggtgatgggg gagtgggtga cagcaaccct ggctcagaga atgaacgctg |
| 51421 | gcaccaaccc tgggcattgt tcactttcca ggccaccatc tgtcagccaa gccagtggca |
| 51481 | actgctgttc tagaccatgc ttgtaaataa aacaacaagg ttcaacaaat cttggcatgg |
| 51541 | aagtgggaag aatcatctca ggagtccctg ccgcatgacg gcgtgaaagt gaactcacac |
| 51601 | aggatgagct tggttggtca agcaaatttt acagagatgc tataggagca ttggaaacag |
| 51661 | actttttatt taacagaaac ttacacacac ttggtacaaa ccctacatta tgcaaacctt |
| 51721 | tatcacagtt ctacacaggt tgtcacttgt gggagttggt tggaaagcag attattatga |
| 51781 | taattattag cattttgaca agggacattt tctaccagaa aacgtcagag aaaagggcta |
| 51841 | caaaatgata cagacactct cggtgatccc ctccaccaac aggactggct ttgaacagga |
| 51901 | aacctgaaag gactggcagg aagtcggtgc ccacctgccc tgccctttca gaggccaaag |
| 51961 | agattctcag gctcagaacc atttcagtaa cactgtgact caaggacctc tgctgaccag |
| 52021 | aatacccagc Sttagactat tcgtgtgtta ttatgactct gcttacaagg gagggaaacc |
| 52081 | caagagcatg gctgtgtgaa agcccagtgc agtggggagc ctgcgggtag aacccagtgg |
| 52141 | ctcagccagt cagccctgca cctttgctgg gccacagaca cagcgccgag atacatccca |
| 52201 | tcggccaaaa cgcccacttc cgccagctca gccagaaagg gccaYgttag aacacccgcc |
| 52261 | gtcttccttg gctcccacca gcaactgaat ttgaggttct catccttcag gtcggccttc |
| 52321 | ctagcccttg gggacagctc tggaagctca ggccccagaa gccagctcag cagaaggttc |
| 52381 | cctttcctca tctcttctag gagttgttag gtgactgaac taatatcacc tcagctgatg |
| 52441 | cttttatttt tgcttttttt tttttttttt ttttgctgca ttattttaaa caaagctctc |
| 52501 | tgtgttcgaa tctattgaac ttgaggggat atattccatc aatagatgga attccttcct |
| 52561 | gagctagacc tcatcagaca tgataactag gagNcaggct gcttctgaca ttcagataaa |
| 52621 | aggggcttgc ctggggtgag ggggcaatga gggtggggga aactgctgat ttgtggctaa |
| 52681 | gttatttcag tcaaatctta acacacaatc atttaacatc accaacactt tcaatagact |
| 52741 | tttgaaggag gaaaaaaaaa ctgagcactc ctcacttacc acatccaact cgcagaaata |
| 52801 | aaaataccta aagcacatac atgaatggct ttttaaaaag cctgagagag cagagttgat |
| 52861 | ctttattttc ttaYttaaaa tgtggggcat ttttctttag agttaatatg cagtctttta |
| 52921 | ttttacatta agtactctta tgatttcatg tcttcacaaa attgcgctta acttttgaag |
| 52981 | taggaggtac tttaaacaaa aatactgtgc Matgtcagca cttttttcct tttaaatatt |
| 53041 | gaaataaata aaatagttaa ctcttttttt ccatcagttt gtttgtgttc agttatttct |
| 53101 | actgtagagt aattccaggc ggacctgggt actttctcac agacaatcaa agaaaatata |
| 53161 | atgaagattt aaaaagaaaa aaaaaatctt cttattgcac aaactgaggc cattcccaag |
| 53221 | gcttctgtgg gctgagctga gttgcgctgc aggattttcc actcctgtgc tggctcctgt |
| 53281 | gttgtctgaa acacacgcac aggagggggc tgggcaaggg aagaggaaga agaggaggag |
| 53341 | gaggaggagg tgccaatcat cctggcttct tttcaccttc ttcggaaatg gcttgcttga |
| 53401 | aggatgctgg agtccccagg tcataatgtt gactgcagag ggaaaggcaa tgaaagataa |
| 53461 | aacaaaaaac aacagcatgg aacaactact taaaaaagaa agatgaaaat taaggggtga |
| 53521 | cagaaatgaa atgaattaaa aaaaaaaaag aagaagaaag aaagaaaacc accaactaat |
| 53581 | tgccaagtta atgaggctag gccaggtgca acaaaaatca gggtagtgtg tccagcgcct |
| 53641 | tgaacttcag cagcaWgaga tSagccagga atagggcagg tcagttgcta ctgggccaga |
| 53701 | ggcagagaga Rcacagctgg atggtcaatt cccaggtggt gtagcaggca gaactgggtg |
| 53761 | ttagcaaaaa aaaaaaaaaa aaattcccct ccacttaRaa accaaacaaa ctgaatcttt |
| 53821 | tcacagttaa aacaccccaR aaaggacctt tatgatgtca tctctctccc tgYcatccaa |
| 53881 | gtaRaaatga gtagttctat ggtatagaac caattcagcc acagaaaacc ccatcaRatg |
| 53941 | cctcatttgg cctaagccca aaaggacact gcttccttca caagcactca cactcagccc |
| 54001 | caaccctgcc ccaagtgatt caagtgtgtc aRagttactc ggagacagtc cccaaccaag |
| 54061 | agaccagttc cagtcctcta ctagcacagt gatccctttg tcagccttgg aacctggtgg |
| 54121 | tggttcacac aggtgggccc ttttgcctgg atagccacgc atagcttttg cttctagctg |
| 54181 | aaatgaaatc tgccattttg gtctttggaa cggagtagtt gacacaaagg agtgagcaat |
| 54241 | gaaaccaagt actgccacat ttcaccccgg aagcagtttc tgaaagcaga gatgggtgtc |
| 54301 | ccaacagtgc ctagatcaca ttaagctgag cgataaggga gggagaagag gSagaatggg |
| 54361 | cctaaatgga aaatggccaa gccagcaagg aaaaaagctc aaaagcaaat gagcagctca |
| 54421 | gcctcttcca agttgaaagg cccctcccct gccccacctc tcctggtacc caagcatcac |
| 54481 | tcaatggcca ggtgcacagg cctggattag atgctcttcc aaagctgaga ctccattcat |
| 54541 | ccaactttcc tccttgacca agtcctccct ccacacctgc tcctgttcct tgcctctacc |
| 54601 | ccatcccacc ccactgtctc cctttctgat ccgctttgct ggtgcaccct acccccactt |
| 54661 | ccctcatgct ctttgctgtc accacctgcc tctagctcct tcccttgact gatcaaaccc |
| 54721 | aggtgacctt tcctgggacc tcccacagaa cgcctgccga ttgttctctc catgggcatc |
| 54781 | tgtcatcatt tcactccctg ccaggagtct ttctgtccct ctcccagtgc cctgacccct |
| 54841 | ctggtcagat gttacctgcc actctgtagt gagtctgtct cataagctta ccccacacct |
| 54901 | ttcagtttct tcaaatttcc accccgacct cccaacacac acacacatgt atttttcctt |
| 54961 | tgccccacta aagccaccta gaaaatcatg cgtgagtccc aacttggcac tcctaacttc |
| 55021 | cattttctct tttgtttcct ctggtcaggt caactgcagg ccacaaaaat gaaacaatgt |
| 55081 | gcagctgtgt tcttagtctc ctgctctcaa tcccctgcaa gaaggcatag ttttctaccc |
| 55141 | ctccacacac atggtcaacc cctccccacc cctgtcctga catccccctt ttctctcctt |
| 55201 | tacccctcac caccacctca ccacctccca cctgccccct ctgacttaac cactggatgc |
| 55261 | tgtgtccaga gacttctcca ttctttctgt caacaatatt tattaagcat cctctatgca |
| 55321 | tagagtgaga tttggtaaga cttccactaa ttatctcaga aactgctcag ttctcagttt |
| 55381 | atttcaacaa ataattatgg cacactggtg tcaggcactg tctggaggaY atgagtgata |
| 55441 | tcacctttgc cctcaaggaa cacgccatct gtttgagaag gactacaagc aaacatgatg |
| 55501 | tgttgtgata agcacaggag cggcaggaac aaaatgctat ggaatggtac ttaggcgggt |
| 55561 | tttcaaatgg tgatttttgc cattttacat gggttaggtt gtgattccca gctttgcttt |
| 55621 | ttgttcgaat attatctcca ttgtctctga caatagacat tcttgcctac agattcaaca |
| 55681 | gcaacggtcc atctggagct ctttgttgat ctagatggct tcctccaaga aaatcttctt |
| 55741 | gtctactgag atccatggca aaaataatca catactaccc catgacagct cttacatgat |
| 55801 | tttaactatt tgtgaatttc tagtctgatc cactaggtca caaaataaat ccaatggcca |
| 55861 | ataaattcat tgccccatgt ttaattttat cctatccttg acagtgctga gcagtcacaY |
| 55921 | gcatactgtt attactcagt ccctagttgc caaatgaacc gaggtatatc tgaatgaaaa |
| 55981 | tgttatcatc caaggtctgt aaacagaata gcctgaaatc tcagctgaaa ggccaaatgt |
| 56041 | ctgagtcacc agtaatgggg taaatcaatc acatacctcc Kgatgtaatg cactgagaag |
| 56101 | gatacaacat catttctaag gtattctaac caaaatgcac aacttcagtt tagtcattag |
| 56161 | aaaaacagca tccaagcctg aactgaatgg cttttgctat gaaatgacta accagtatcg |
| 56221 | aggttgWgaa aaacaagatt gtagtactaa ctattccaga ttaaaggact tgtaagagga |
| 56281 | catggcaacc tgtgagccca gactggatcc tggaccagaa aaaggacact agtgagacaa |
| 56341 | ctggcagaat ttgcataagg tctgtaggtt atagcattgc atcgatgtga atttcctgat |
| 56401 | tgtgatcatt gtactgtggt tatttgaaga atctgggtga aggacatatg ggaattcttg |
| 56461 | gtaaaatctt tgtaagtttt ttgtaagtgt aaattatttc agaagtaaat tttttaaaaa |
| 56521 | gccatagtta ttggttgagt tccagtggtg agatactttg aaaacctaat tgccaatgtt |
| 56581 | ttttatctaa taattcagtt ctgacaggaa tcttccatca ttcccattta ttttgtaaac |
| 56641 | caatcatgca gaatggcttt tcctatattg ctattttgaa taggtgatca gaaatcactt |
| 56701 | ttattaaaca ccacaatatt atataattca atgtttttgt gttagaagca attgggtttg |
| 56761 | tgaccagggc ccaaaatgtt cactccctgc caccattact cccgctacca ctggcaccac |
| 56821 | aaaaacagtg accatttagg aagctcaact ttagttctcc cagaaagttc atgaggactt |
| 56881 | agacattgct acttctcaga aagattctaa tgtgtcatag tttcatttgg ggtttctgtt |
| 56941 | gtttcagttt tttcttttac agaatcaaat acctcctttt catccaataa attcttgaat |
| 57001 | aaaagaccta caggcatttt actgatttca ctcaagaaat cttccaaaga tgatctttgg |
| 57061 | ggaagtcagt atagacttag gaaagattat tagaagatcc atacatcatt tactgagcct |
| 57121 | ggaactttag acaagtcatc aaacaggatc aaatctcagt ttcctcatca gtaaaacggg |
| 57181 | aataaataac atctacccta cctcatagag ttaagcatca tcatgaaata atataagcta |
| 57241 | catattctaa tagggaaaga aatgtccatt tcctctctca gaaactgagg cagagatccc |
| 57301 | tgtcaacaaa ttcacacagg gagctgagcc cagagcccag aacttgtcaW ctccactcta |
| 57361 | ggcttccaca caccagatca aagacacctc actcagaaaa tacacaacac aagtcacttc |
| 57421 | tcctccaaag gctgagcaaa atcccctgag gaaaaattcc taacagatga gtctgctcca |
| 57481 | attttaagta caYgttcaag atcatattca tcagatgtaa caggaggtat actgggataa |
| 57541 | aattaattaa ttttattcca ccatgaggtg agaaccccca aacacccttt agttctctcc |
| 57601 | ctgagtaatg atcttgcatt ccctccagtg ctgtataaag cagtatcagt ctgtagccca |
| 57661 | ttagatgcag agagagatgc aSagtaagca ggaaccctta aagggatgct attgatgtga |
| 57721 | acatcacatt tttttttatt aaattcttct ctctaaaata ccggtagcaa attggattac |
| 57781 | tgtctttata gtacctctaa aaaattaaat gcatatttct aattcccagg gtcatagtga |
| 57841 | ttatagtgtc tgatctttac atagtctctc agtaacagaa ataaaggatt tgattgttct |
| 57901 | aggtagggaa aaaaatcagc tagaccataa caattgtcac ctttaggtca acagcccccc |
| 57961 | tccccagggg attaaaatgt tgtaacaaat ttagaaagtt ctatatcttt ggttcccctc |
| 58021 | tctttggcct gggactcaga aaactcaggg tggtacttta ctgagctgag ggcaaaggaa |
| 58081 | gctggccaga tYgttttcat cttgatgact ctaatttctt ttgtatttta aattttgagt |
| 58141 | agtgatactt atttaacaaa agcaacaaca gaaaggtgtg ttgactgttc acacagctcc |
| 58201 | tacaattcct aaggtcacaa aaaaggtgat ctctttgtac attgtctaga agtgatgatt |
| 58261 | aagaaggtaa gttatctaca atattccgca gagaatctga attagaactc tcttttacag |
| 58321 | gatctaattg cttactcttc cgttgttgaa atttctttta atgacgttac cttttaaaag |
| 58381 | ctatattcat tacaaaaacc cttttcttca gttggaattg agaaacagca aagtatgtat |
| 58441 | acatgcatgc atatatattc cttaattata gactatgcaa ggggcaatgc aggcaacgat |
| 58501 | agagtatagg ctctacaatc aggttgccag ggatcaaaac ctggctcctt cctaggtgta |
| 58561 | catttcttaa ccttattact aacctcagtt tccgcaaact ggggattaat ataaacacct |
| 58621 | atctcatggg agtagtcatg aggattaagt gaaatattcc aaggaaagcg cccagaataa |
| 58681 | tgcctcacac aaaaatgtag atgactgcta tctagaaaaa gggagataaa Katatcacat |
| 58741 | ccaccactaa agtggttgga aaccaaggac agccagcttc ctcatccgac accttctctc |
| 58801 | tcggagcttc cttcctttgc cttaaWacat ttccctccaa tgcaatgccc atcccagtcc |
| 58861 | ctccaactta actcacttaa cctctctggg tcaacttttc tcaactgaaa agtgaaagat |
| 58921 | ttgaacttga tcatcttaaa agtcccttcc agtttttaag ggtataaatc ttgagtccgt |
| 58981 | tcaaagactc tataagcaag gtgagacaag atggtctggc catgctaaga aaccttacta |
| 59041 | tgcttctatt accccaagga agaaaagtga ggatatcaac tacctccaag aagagaaact |
| 59101 | gaagatcaaa tatcaagcta tactattaaa tataaaatag acaagcaata cccattctca |
| 59161 | gataaacatt ctcctgggag tttgccttgt tagttctaaa tggttagttt ctctgttaga |
| 59221 | ctccaagcta gactctgaaa ttaggtagcc ttttataatt tgctttaaat atgtggatta |
| 59281 | aaaaaaaaaa cacctcaagt gtaaaggcaa attgtcattg agaattctgg gactatgagc |
| 59341 | aactagacag aattcaaatg agagtgtaga ttggttgaac atatgtttat taacatagaa |
| 59401 | gctcacattt tatcaatgaa agcaagttgt aatcccatga atccaatatc tgagtcaaag |
| 59461 | gtacagagta aagaggtgga aaatgacagc aagtgtacat tgtatccccg tagcagaaac |
| 59521 | ctactggaac aaactctatt ggctgacgtg tgagcatgca gaatatgaca accttggagg |
| 59581 | tttatgccat atttcctagg aacaggccac atatagatta gacagaacaa cccaaaagtg |
| 59641 | gttgggattg ttactttcat tccctcaaaa ctgagaataa atgcccaggc gatcacatac |
| 59701 | acatctcaag catgagaaaa gtggaagccc tttctgtctc aggctaccag gaaagcacaa |
| 59761 | aggtctcatt tctgggtttc ttggcttgtc cttgtgtttt aggttggttt gttattttaa |
| 59821 | ggagcggtct aattcatgag gatctgcagg ggctggactg tcaaagtaga tcttcccaga |
| 59881 | gacactgata agcagtctgt taaccaggca gctacttggg tctcccaacc catgtcaaat |
| 59941 | ggttctgcct gtgtttccag aactgtgcac tcctggaggc aagagaccct ggccaacctt |
| 60001 | aaagggagtg cagaatcttc caaacagcca agttgagttt tgtgcctaat cagggatctt |
| 60061 | ctttaatttg gactcatccc cttggttttg aaattggtac cgagagtaag aaataccacc |
| 60121 | tagacatgca gtgccctgtg gccacaacct ccctattcct acccaaatcc agcagccaac |
| 60181 | tccaacttca gttccctgga tttcacttcc aggtttagcc aagggaggca gagttagcca |
| 60241 | agcacttccc cagccatttt ctcttgtagt tgaagccaga agcctgccat tctccacact |
| 60301 | gagcccctcc catagtccaa gcaagactca gatcacacac ctatgccagg gcccacatga |
| 60361 | gttcacatgc acacacaggc cacagagggc cagggggaga cactccagca gccactctta |
| 60421 | cactaagaag ggagtccaaa cccaggaaaa caaaaaagca agctggggga aaaaggaaaa |
| 60481 | agaaaaagaa aactaaaaaa tagatatgat ggttttgccc acattgcaag acaggttagc |
| 60541 | caagacatac cttttgacta ggacctcgca gccggtcatt cttgggactg tcagtgaggt |
| 60601 | gggtggcctt ctccatcgcc ccaggggcct tgagcagtgt tgctttggtt tatttcagga |
| 60661 | agtgctattg gaaacataaa acaaagtgcc tggcaggcac tataaaaaaa aatagaagaa |
| 60721 | atacggtagc cttgatcatc caatgggtat tgatacgttt cttaacaggg gcaaggggag |
| 60781 | gggaaacaca cgatgatgtc tccttctatc ttccagaagc acggcctcgg cctcgggtgg |
| 60841 | tggagtcact gctgagccca tgacgttctg cttatattcc atccctgcat ttggaagtcg |
| 60901 | ttctttgcca ggaggRaagt gaggaaaaac cagcaataac aaaacagcag ctctactgac |
| 60961 | ggaggaggag gagcccagga ggcggctggt cagggcccag gtgtggaggg aggccaggca |
| 61021 | taggcacccc gacttctctg gaactactga cattttctcg caagcagaga ggaagatgga |
| 61081 | aaggtcaggg aggagaatga gggaggggtc tgccgcgggg agccgcaaac tccgtggggc |
| 61141 | acagaatagt gcaaccgtct cccattgagg aaattctccc caccgggcgg cttgcctcta |
| 61201 | aacaggatat tgcttcgatt tctttgattt cccttctctc tctctctctc tctctctcgc |
| 61261 | aaaaaaagtc tgattctaat aacagctaga atatataaat aataatgttt taatgttatt |
| 61321 | ggttctttgt ttccaaccca aagttcctct tctcttcctt ttgccaataa atatgaaaat |
| 61381 | tgaggacatc aactctgctc ctgtcaaaaa gaccccctcc cctcagaaaa gagacaatcc |
| 61441 | gtctaacttc ctatttctat ggaaaataaa tagcgcatca cgatgccatc tctcggaaga |
| 61501 | acgctcattc tgctgttttg ttttgtttca gtagtttgtg cttctgttgt acatacccaa |
| 61561 | aacagagggg tggggggagg gatggaggga cacgtgggag gtgaagggaa aaaaagcaag |
| 61621 | gatagaggga aaatctaaag ttgcctttca ttaaaaaaaa tatatatcag aaccagcaca |
| 61681 | atgaccaaag tcagaggggg atggctaatt gcccagagag tctgttccgt gggtttagca |
| 61741 | actgcccttt ttatctgctg tgggcgaacc ccggccactg cggcgtcctc gacaggagcg |
| 61801 | aggctcttcc aaatcgtcct catcaaagcc gtggaaagtt gacgtgtcac tttctgacgt |
| 61861 | ggaaccgaat aagtcctccg tggtacgtgc tgcggccgct gcctccttct ccttcctgcc |
| 61921 | ttctcctccc aaatgagctg acatgtatga tgaatatatc agcacatggg ttaagcaaca |
| 61981 | gacagcatta ttaatattct cattacatta ttacaatgct attcttaata gcaagatata |
| 62041 | aaaccaYttg cacaccaaag ggattaaccc ggtgcatcaM ctggtgacgg ggatttggga |
| 62101 | caaagcaaac atttccaggg aagaggcttc ccccactccc cgaaaaggca tcatctctac |
| 62161 | catagtacat atgtccacag cttccgacag caaaagattc aaccatgatc tttcttctgt |
| 62221 | tgtgcataca cacaggcgct tgcacgctca ctcaaccctg ccccagacaa tgattttcat |
| 62281 | tggtggtttt taagcctggt tgggatttct ttggtgtttt ctgttggtgt ttctttgaac |
| 62341 | aatgtttgtc cttcactttg acagtcagct gtacaaaggt attactgtca gataacccat |
| 62401 | tcaaggtggt taagcctcca tctatttcat ttttatttta cccgcttcta atcccattct |
| 62461 | ttcagaaccc tttcaattct ccccttacgc catgtcgttc atttgcactg aaagcaaaag |
| 62521 | gaagttggaa agtctgataa gtggtaggtg ataaaatagt ttgtttcctt taaccacagg |
| 62581 | aggaaatttc tgtgatctgc atccacatac atgtgcacgt gtgcacacca cacacacaca |
| 62641 | cacacacaca cacacacaga cacaSacaca cacacacaca cacccagcca ccagccatgc |
| 62701 | ccaggtatcg gttactccag aaagttcagt tgtcaaatct cattcagggc actacaaagg |
| 62761 | tgagaaatag gagtagaaaa gccctaataa atcagagcat cctgaaatYt gtaaaactca |
| 62821 | ggtttaaact tttttgcatt ctaaatgagc cccaggactg ctcttgtata aaggaatgat |
| 62881 | acatccctca tggtgccaat ttcaggaacc tcactttctc ccaggaaaca gcagtggtag |
| 62941 | ggtagatggg aggggaagga agctcttcca agctccatac tcttctctgg aaggaccgta |
| 63001 | gggaggctcc agagaagtat tcgcccacct gccttaacaa gcacatctca tctcatgggc |
| 63061 | caatgacacc tgtttcttcc catggtatca actatttcag gaacattaga gtcagacctt |
| 63121 | gactaaatca tctaccaaaa ccaatccttg gcaaatgcag tgagaatacc taggctggta |
| 63181 | gaaaatggct ccctgagcca catagcagac agaaccttgg agggaaagct gagggaaggt |
| 63241 | tgtggaaaga ggctttgcat agaaaaaaac aacttcccac tcctgacatc ccatggcttc |
| 63301 | gattctagca cccctctttt gtaagaaagg aaggggagaa attacagcag tttgcaatga |
| 63361 | gaattctgaa gctgccccct ctaacccatc caaacctaca gcagtccata acgtgttgct |
| 63421 | tagaccatca cttcaagtga ccttgcttct ggaagtagag atttcatctg attgcttgct |
| 63481 | tttaaaaaaa cactgcattg aatttcatct gtttttttta agtatcttaa aaaaacagag |
| 63541 | tccgctatca caagggccct gtcttctacg ctagcatcca tagaataaaa aattcaatgt |
| 63601 | taggtaccat gtttggaaag taaatgaaYt gacagaattg cacaaatgga ccacccttga |
| 63661 | gagtcacacg ttgagggttg tgtgcagcag aaaccacagt ccttttaaaa ttactgattt |
| 63721 | gctactcaag ccagccttaa gccctaaaca gccctaccat caaaatataa aagggctaaa |
| 63781 | gctaaggttt gcagacagag caaggaaaga gctgagttgc tacagtcaac catgatgggg |
| 63841 | tcatctcagt tcttctctgg ggactgggag tgaaaaagac actggataga aaggtagaaa |
| 63901 | ggagaaatga ctcctcattg ctggaacaaa gcatccaacc aaactgtttc acctactcat |
| 63961 | atcaggggct gatgagacta aaaatggggt tgaaattccc tcctccctgc ctcacactgt |
| 64021 | ggtctagtgc tgacataata caatatgaaa aataggtagt accaaccaac catggccagc |
| 64081 | caaaaataat ggtttggtta gaactaaaaa acaaaacaac catttgaaca taacctgaag |
| 64141 | acctgaattc attttaagaa tgaaggaaca agaccaaaag tctctttctg ttattttagt |
| 64201 | ctttggatag gttaaaatat aaacatatac accaaatcaa ctgcagatta gccctaggaa |
| 64261 | tgcctgtcct tttgcctcat tgatctatcg gggtctcttc tgttctgttt tagaaaatga |
| 64321 | gattagtggc caatggcggt ggtgtttatg cagctagcca ggagcccggg gatctctgac |
| 64381 | tcccacaatt caagatgtgg ttgctctccg aatactcatg tttccacacc acaccacact |
| 64441 | cttcgggttt gccctaggca cttccacaga acaaactcat ctttctgtta catgtgcatc |
| 64501 | atccactaca agaaagcacg ttgccttctc tccaggtttt tccactctac ctcgctgtgg |
| 64561 | tccgtaaaaa cacgcacaaa gaaatatgca cctcatggaa aggccagaca caaacccaaa |
| 64621 | acttctcttt gccctttccc ccggatccta gggcataact tttggttctt gagacccaaa |
| 64681 | gaagaaaaat atcagaatga gctgaaaact cctctccact cgaaagcatt gccaccatcg |
| 64741 | cttccctctc cagtctccag caccacaaga tggaagagga atgcaagagg agcattcctg |
| 64801 | gtctacgggc acccggtgtg ggaaggggcc acactcacca gagcgtccac agtctgcgca |
| 64861 | ggacaccagc tcttcaggcc gcccactctt cttgttcatg ttggagcccc ccaagcagaa |
| 64921 | gtcacagtag ttattgggaa tgactgttcc atccggtcct ttctgggctg tgggaacatt |
| 64981 | taaaacattc caatttcagg cttacatgag tttcaactgc cccttcttct cctcctacag |
| 65041 | tgtggtagaa tctgctccag aaggaatctg aggttttatt ataaccaagt tggcaaattg |
| 65101 | ggctacgctt tcttttggat ccttccgggt ttaatggtac taataatatc ttgcaagtca |
| 65161 | cccagagttt aatttttaga gtattcccca gctctgtgtt gttgcagaaa tcaccctgct |
| 65221 | cctctgattg catccttaga tgatcaaacc atccagaaga ggtactggtc aagtgaacta |
| 65281 | ctctcagccc taaacaatca gccctgtggg cccaggcccc aggcatcaga tggaaaccac |
| 65341 | acaccatggt gtgaggacag ggagaggaaa gagccagtgc ctggaccttg ccattgggaa |
| 65401 | cagtgctctt gtttaggaga tattcttcct gYccctgaaa tggaaaacaa agaagcactg |
| 65461 | atgggaggtc atttccagga ataacaccaa agatgctctt ggggacttgg acaaacaact |
| 65521 | tggtggagta tcaatctccc tgaaggggag tctcatctcc ctgaagtcca gacccattga |
| 65581 | tcatggaaaS tgcccaagac cccaagtgcc taaaatcaga actagaccca ggcttctagg |
| 65641 | cacttggctc agcctcatgc cagagatgga ttaaacggtg agttactgag catgtcttta |
| 65701 | ggcttaagac cgtcacgaat aactgaacac actaacttca aaacccactc ctgctggagg |
| 65761 | tccttaaaca aaagcaaaga aaaatcttag gacatgactt tgaaaacaaa gcctgtgagg |
| 65821 | agaatagcac ctgtccttat gcaccaaaat cattccattt ccaggggctg cttgaRaagc |
| 65881 | cttgaacaga ttatttgcat ggagagaaat acttcccttt ttctgtttct ccctccctat |
| 65941 | tgcgggcatt tctttgtcat attcacactc cctgtttgta actaagaaga aaagtctttc |
| 66001 | tgtttatggg atcagcccta accacccaag tatcttcctc ctcaccagac ccagtgtctg |
| 66061 | ctgctgcctt tcattattca ctggctaacg ttaatcaggg tcccatacgg tacaaatctg |
| 66121 | aaaaaggaag cagagatgtg agcagaaata ccatccagac agtaagtgat aaacggattc |
| 66181 | acccacttta atgtgattcc ctctggcctc cacttcctcc atgcctctgc tttgcctcca |
| 66241 | ggaatagaaa acctacctgg ggaaggcgga agacaaaagc tagaggaatt tcattataga |
| 66301 | gggttaatcc atttatcagt tgctatttgg attgtttaat tggtttctaa gtcattgatt |
| 66361 | tccatcttca gggaggcaga caattctctg caagaagtgt tagctgtttg ggggacacag |
| 66421 | aggagctggc cacattctgg ggtctgttca gtgtaggctt gtcttcatca gtccctggat |
| 66481 | ctcaaacaca tttgcatggc atacagaatg cttttgcaaa taatctccaa aaagcagtat |
| 66541 | atctgcaaat attttactct gcctataaat tttcattgcc caaatccaga agtaccagag |
| 66601 | tccccttctc ccttctccct caattgccat cttagtcatt tttagaactc tcctaagaaa |
| 66661 | atccaagcat ctctatgaag caaataaact cagggtttcc tcaacaagat atggatggaa |
| 66721 | aactatcaaa tggtgaacag aaagaagaga tagggtatac taaatttagg ggctgagggt |
| 66781 | aaaccaaagt taagtgtcat gattgatatg agctagatat aaaatgtgga gatgccagtt |
| 66841 | gttacttagg tagcttcctg tatggaaggc aatcagagaa tcccatatat atcattcata |
| 66901 | aaaacttaca gggggcctag tctcctcagc tgtctctctc ctatactctt agggacttcc |
| 66961 | tataattttc aatttcctcc ccattcacaa gatctttaag caactaaaga atctgatttt |
| 67021 | ctccaacaca ctgtctccct catgacgtat gaggatgagt aagtaaaata tagagtataa |
| 67081 | aagcttgcag attaattctt gatatggttt ggctgtgYcc ccacccaaat ctcatcttga |
| 67141 | attgcagctc ccataatccc cacatgtcat gggagagact gagtaggata taattgaatc |
| 67201 | atgggggcag gtttttccct agcagctctt gtgatagtga ataagtctca tggcatctga |
| 67261 | tggttttaaa aggggcagtt cccctgcaca tgctctcttg cctgctgcca tgtaagatgt |
| 67321 | gcctttgctc ctcctttgcc ttctgccRtg attgtgaggc ctccccagcc aggtggaact |
| 67381 | gtgagtccat taaatctctt tgtctttata aatcacccaa tctcgggtgt ttcttcctag |
| 67441 | cagatgaaaa tggactaata caattctaca cagcattcac taccaacaga ccattggtag |
| 67501 | aacaccctat tgaatcagga actctaatac tacaagaaat aaaaaattag aaatgatcta |
| 67561 | gtagagctaa gcaggcagtg atggaagaat tcagccttcg taaaaagacc aaaggaaaag |
| 67621 | aattgaattc atctgaaaaa gggaagcttc tgacgagatg gagtctgagc agcatcctgt |
| 67681 | tggccataca gagttcctgt ccaaggggtg agggaggtcc taaaatccca tgtataggcc |
| 67741 | ccggtatgtg caggagtgac atgccaggcc agctggggtg tggaggtaca tttttagtct |
| 67801 | ggcaatggcc cagtatagaa agtgatcatg cacagctgtt ttatttttca gagaaatcat |
| 67861 | ttttgcttca gtttctactc tttcttacaa cagtgagctc aaagcatcct tccattgtgg |
| 67921 | tcagatggtg tggaatggac taattgctta tgcacctgat tttcttaaac attttggtac |
| 67981 | ttgggattag tttcagagca agggttctcc catggagctc tcccaaactt cagctaaaac |
| 68041 | atatcagtca tgccctgggg agggtactgt tgatatcacc attatgaccc ttgtttatat |
| 68101 | tgagtctgtg tgcctcctct ccccgtttca cattatcatc tctccatatt aaataggtct |
| 68161 | actccttcag gttggagacc aggtctaacc cgttgttgga acccctacaa tctgtgggat |
| 68221 | gagtgacttN agagagggat ggcagggatg ttagtgggtg gYacagtgat gccctgggag |
| 68281 | caccggatat cattcactgc ccctggttta tttccctacc agaggagagc tggtccatgt |
| 68341 | gtgcatgaat tggtctgtca cctggtctca tggccagctc ccagagtaca cagaagtcgg |
| 68401 | tagccaatgg ccctgagtca ctggaagaat aatactgtac ccctcctgtg ggaggcgaga |
| 68461 | catcattctg caccaaacac acaagaacat agaagacaat gattcattgt ctcttgagaa |
| 68521 | gaggatacct ggtcatgcct atccactcag cttccctttt gttcaactgc gtattgaaag |
| 68581 | gagaagaaaa ggaagcagac atttatcaca ccacaaaact gtggcaaatc ttttgctgga |
| 68641 | tgctttatat atgttatttc attgattctt gcaaaaactt tgtgaagtag ggaatttttt |
| 68701 | gacagatgca gtaactgaaa tccaaagaga ttaaagcgct ggctccaagc ctcggttggg |
| 68761 | ctcttcgaag gcaggtttca cccccagttt gtctgtgtcc ccagagattg tgcctctaat |
| 68821 | cacacttctc tgcctcctgg gaagtccaga ggtaaacact ttgcagccat accttgcata |
| 68881 | taaaatattt cataaatctc tttagagtca aYctgattcg cccaatatga tatttacgaa |
| 68941 | gcccaaagct ataaaaatta ttgagaccgg cctgataaaa gtggaaattc cctttgaact |
| 69001 | taaatttaat gtccctacta cagtaatcca tcctgggtga tcctgtttat tgtcatctac |
| 69061 | tctatgaaaa cacttctctg gagaattcca gaggctcatg aaggaatttt tttaagtaaa |
| 69121 | gctcacatca tggctaggtt ggcctatggc ctgacccagc catgagcaat ttcctggtac |
| 69181 | tgtatatgag atcattataa aaaagatttt actacaaata ggaagctcgc ccagaccttg |
| 69241 | taagtgggat ttaaatagag attttgcttc tgcttatggg aaattgagtc ccgctttata |
| 69301 | gaataagatg acggggaggg caaagacccg actggcatct ctatggcagc atctgcgatg |
| 69361 | atggatgtgg ttttctgttg attaatgttc atgggctgag atcatataag agatacaagt |
| 69421 | aagttgctga gaaaataaag tgagccttaa gagtttagaa atctacctga gggagataac |
| 69481 | tctaaaaagc tcaaaggaaa aaaaatggaa atcaggaaca aagttcatga agaaagtaga |
| 69541 | agaaaaataa cagaaggcag ggaagagcat tcagataaat caaagcaaga aaaatgaaaa |
| 69601 | gtgaagcttc acacagcccc atcaccacgc tcagggaagc gagagcaggc attctggaaa |
| 69661 | ggtatcagtg ctcgctacag gatttttgag ttaaatcagg ttttatgtct atggcaaaca |
| 69721 | aggccccaaa tcttccataa aactaccgcc caggcagcac cgcctctccc cctcccagtc |
| 69781 | ggatctccgc tgtggtgtRc ctgccactca cagaaagaat gactggcagg gacaaaccag |
| 69841 | ccgtcggcaa cagccactcg tctgggttct gctgagacca gagctgcgtc ccaagcatcc |
| 69901 | tagggaacag gaaactggcc agaagttcag gctcctcctt ggcacgtgca caaaagcatg |
| 69961 | gcctcacatc ctgagcagac gctctgacca cctgccaggg cctggtgtgc acaaatgcgc |
| 70021 | ggccacNctc ggtgcccacc acccaccacc cagccccagc cccagcccca gctgagcagc |
| 70081 | tccatttctg gagcctgcta gcctgggaag ttggggtgca cagcccttgg ggaattcggg |
| 70141 | ggcagtgagc agagccctct gggaagagat gcgcctctcc tcgcccctct cgtttgttcc |
| 70201 | ccccgccacc ctccacaggc tgacagttcc cgtgtccctc tacaggtctg acatgtttcc |
| 70261 | atggcaaccg gaatcctggg ctccggcagc ctccgctctt gccacctgtt atgacttcat |
| 70321 | ctctcaagtg taaagcatgc tagccccgtg ccacttggct gtgcagagcg catcttcaga |
| 70381 | ggacgacgga gggaaggaaa ggggagagga aaggagggaa agcagacagg cagcccaggc |
| 70441 | cggccaggcg ggacgtgctg gctaggccag tccagaggag gaagcttggg ggccggagat |
| 70501 | gagagggtgg ggagtaaggg tggaccccga cgtgccttcc ctgcagaatc aggagcaagc |
| 70561 | ctcagctgga ggccactgcc acagcctgct acctcggcct agcctttaat gagggctgcg |
| 70621 | ggaggaggga gaggcgggct ggggagacaa ggcgcctgcg aggagctccg gcaggcccag |
| 70681 | cgtgaagcag agccaggaga gggttaaaag tggcgtgata gagactgtgg ggaaggctgg |
| 70741 | accagagggc aaagggagca tcaaagccgg gataaatggc cttaattctc atgctcccac |
| 70801 | tcgctggtcg tgtttactca tataaattat cccccaggcc tgacaccttt tttcactgct |
| 70861 | tccctagaac tgatgaaaaa ataaatccca cagatcccag gaataaaaag tgtggggctt |
| 70921 | tcattcaggc tggttctcct tggccactaa tagcaactca ggtcccgccc cagggctcca |
| 70981 | ggaggaagac aaaggaaggc ttcatcccaa atgtggaggg gcagggggcc tggaagcctg |
| 71041 | gcggggaagc agacagtagg gcccgctccc cacaggaccc tccaatcgtc agagccctcg |
| 71101 | acggcagaga actcgctctc cccacaggcc atcttgccac cagctctgag gacaccgtga |
| 71161 | atatatggga aagtaaaggg gactacgctg gagcggatgc ggaaggcgct gaggccaggg |
| 71221 | ctgctgtcat gagtcctcac atttatggat ggggctgata aactgtcaca ctccgcaccg |
| 71281 | tcaaggacaa ggtgagaaga tgagctggaa tggcagcaca tgccacagga gagctggaaa |
| 71341 | ggcaggtggc taacaacgaa agccatggcc agagggcggg cttctctgga gaggcctctg |
| 71401 | cacacaggga agggccccta ggcccggggt tttgactgcg ttgccgatct agaggcaaga |
| 71461 | gaacacgcta ggtgatgtcc tgaggtccct ttcaggccta ttattcaagc attataatca |
| 71521 | ggtgaagaaa gagacagaaa agccaagttt tccacaccca gaggaaccca gcctttcatc |
| 71581 | actgttctat actcatgtaa atgcctcttt gcctgttacc catgtgctac ctgagggcac |
| 71641 | atgagtaaca cctgagggca ggaaccatgt ccttcactgc ggtatccctg gcccctggcc |
| 71701 | agcagtgagt gacacagagc tgacaatcaa tgctgagtga aaggatggac aaatcatcac |
| 71761 | agaggctttt tgaggggaaa aaaaatctgc caggcaaagg gaagttaatg actaggaatt |
| 71821 | gagtggacgg agagtccccc gagcacaggg tgaccatcct aagtccctct tatatcgggg |
| 71881 | cacagaagaa gtgggaagga gaaatattgg agccccttgg agagaagaaa gctgtggtgt |
| 71941 | ggaaagccac tgcatctacc tcccccagga atcctctctc ttaggcattt cttagtcaac |
| 72001 | cagaatggaa ggcatcaaga atccccaggc tcagctggcc ccagagtctt gagactcatt |
| 72061 | ctgtctctca ccagggactc agcaggagcc agtgagaaca gaggccccat cttgctgcgt |
| 72121 | gttttggtga ctgtagaaat aatataaata tttcaaaatg tggcgtcaac cctccaccct |
| 72181 | tcctatgcct gccttctttt cctccatctt tatccaatac ttacatcttt agatacaaac |
| 72241 | ctggtgaata tttactccca aaaactgtgc cataaaagca gaaaacatat ccactcacac |
| 72301 | tgatgtctcc atcctgagat ggatatattt ggtgagagtt gtaatttgcg gtttgccaaa |
| 72361 | aggccacaac aatttgccag cagtgtgtgc accatgtcac cagctctggg gctagatggt |
| 72421 | cacacggccc ccaaggaatg tcctttgtgc tccagcttta ggtgggcaac cctaggtctg |
| 72481 | ccattaatgc ttcggaatag taagaaaaag accaagtaaa gcttaggaat gggtcggata |
| 72541 | tgctggctca cgcctgtaat cccagcactt tgggaggcca aggcaggtgg atcatgaggt |
| 72601 | caggagttca agaccagcct ggccaacatg gcaaaaacct catctctact aaaaatacaa |
| 72661 | aaattagcca ggtgtggtgg cacacacctg taatcccagc tattcgggag gctgaggaag |
| 72721 | gagaatcact tgaacctggg aggcagaggt tgcagtgagc caagattgtg ccactgcact |
| 72781 | ccaggctggg caacaagagt aagactctgt ctcaagaaaa aaaaaaaaaa aaaaagctta |
| 72841 | ggaatgttct cagtgttcat gacactgaga tgaatatctc attacgtgac acgtaatgag |
| 72901 | atatttcagt tttccagtgt ttggtgatat gggtcagttc atgccctggt gtggcaactt |
| 72961 | gtgattgcta ccaaatgagt ttgttgaagg agaaaatgtt aatttgagag caactatatc |
| 73021 | aaccaggctc tgaacaaagt gatgtcactc cccttaatga attccagaca gcttggtgtg |
| 73081 | ttagagctgg atgagttttg tctgtttaag ttgtcgggat attattatcg acataattag |
| 73141 | gattcaacaa gccccttgtt ttgctttgcc cagccgtgcc ctctcaaccc tcttcactag |
| 73201 | caccactgaa ctctgtctgc aaggggacca gcattttctt tgttcttcag acagaaagcc |
| 73261 | gtatttaaga aaagggaaag catgagcctt ctgctttaga cctgaggatt tggaaggaat |
| 73321 | caagagacca cagaRtcttg gggcagcaca gcctgaggat ggtggcacac gcaggggcgc |
| 73381 | actccaaaag caggccggga agttggtgct gagagtcaga gacgtctgcc ctacatggga |
| 73441 | tagagcatta ggaaaagagc aaaaaccaag gctgcccctt caatttgaca gtacaaccta |
| 73501 | actcctggcc agttacctgg ctcagtgcat ccaaaagaaa aaaggaatta aaaggaagtt |
| 73561 | gactgactga acatcagtct tggaaagcta gatttctgta aggtagtggt ttacctggga |
| 73621 | acttgtcaaa aatgcaaatt cccagtcagg cacagtggct catgcctgta atcccagaat |
| 73681 | tttgggaggc caaggcaggt ggatcacttg aggtcgggag ttcgagacca gcctggctaa |
| 73741 | catagcaaaa ccccgcctct actaaaaata caaaaattag ctgggtgtgg tggtgcacac |
| 73801 | ctgtaatccc agctactcag gaggctgagg caagagaatc acttgaaccc aggaggtgga |
| 73861 | ggttgcagtg agccgagatc gcaccactgc actccagcct gggtgacaga acaagacccc |
| 73921 | atctcaaaaa aaaaaaaaaa aaaagcaaat tccagggcct gaattgctga atcagaaact |
| 73981 | ctgggggtgg gatccagtgg gtgggctgtg ctttaacaaa tgctccaggt gattctgatg |
| 74041 | cagcctcaag cttgagaaac atggctttaa ttggtgtgac agtcatgtca ccYggaagtc |
| 74101 | attcacttaa tctKcatcat agcctatgag atagatgcca ttaatgatct gatgttacat |
| 74161 | agtgatccat gaggcatatg gaggctatgc agctcagcta aggtcacacg ttagtcagtg |
| 74221 | gctcacttgg ctctgaaccc aagcaaccgc gcacctgagg ggaggtgagt cggagaggtg |
| 74281 | gacacgcagg gcctcacagg ctagggcttc ccagattttg ctgtgcaaat catttgggga |
| 74341 | tctcattaac aatcaggttg gaattcatag atccagggta cagcctgaga ttctacatgt |
| 74401 | cttaaaagct cccctggtag ggtggccacg catccaggtt tgactgggac agagggttct |
| 74461 | agggcgtggg gctttcagtg ctgtagctgg gcaaacctgg acaagctgtc accaagcccc |
| 74521 | aggtgcttct gaccacactg tcagatgcaa aacacagacc cacaagatga ggagtttggg |
| 74581 | ttgtattcaa aYgtgatgaa agtgttgaga gcatgagagt gacatcatct gctttatatt |
| 74641 | ttacatatat atatattttc ttagaaacaa gatctctctc tgtctcccag actggagtgc |
| 74701 | agtggcacaa tcatggctta ctgcaacctc aacctcctgg cttcaagcaa ccctcccacc |
| 74761 | tcagcctccc gagtagctgg gattataggc atgcaccacc acacctggct aatttttgta |
| 74821 | tttttagtag agatggggct tcaccatgtt gaccaggctg gactcgaact cctgagctca |
| 74881 | agaaatctgc tcagctcagc ctcccaaact gctgggatta caggtatgag ccacagcctg |
| 74941 | ctttagaggc tgggagacca atcaaaaaag ttttaacaac ccaggcagaa gccaggggtg |
| 75001 | gccagaagat agagagaggg agaaaatgta gggtatattt tggaagactg aaggaaaacc |
| 75061 | Ragaggcaag gatgaatcct aatatttcac ttcaggctca agcttttttt tttaaaagag |
| 75121 | caagtttaga agaaaaaaaa aatgagagcc aggaaagaca gtgagacaca gaatgagaga |
| 75181 | gaaagactca ggaaaattat tgaatagaat gatgtgtgat ttttttttct gtaggaaaaa |
| 75241 | aactcattta ccaattaaag tatgacctag aatttgtaat gcaggggtgg ggtctctaaa |
| 75301 | acatcccaaa cagcctaagt tagtaaagag ctttgaagag taaatgtgcc tactatggac |
| 75361 | tgaagtgtgt ccctcatccc caaaattcat atgtcagagt cctaaccccc aaagggatgt |
| 75421 | tatttggaaa agggtctttg gaaggcaatt aggttcagtg gggtcatgag ggtggggtcc |
| 75481 | tcgtaatgaa attagtgccc ttattagaca ccaaagagct tgtttctctc tctccacccg |
| 75541 | tacacaccaa agaaaggcca tgtgaggaca caatgagaaa gcagctatct gcaatccaag |
| 75601 | gagagagccc tcaccacact ctgaccctac cagaaccttg atcttggact tccagtctcc |
| 75661 | agaattgtga gaaataaatt ccKgttgttt aagccaccca gtcgatggaa ttttgttaag |
| 75721 | acagtgccta ttaacatgtt catctctttt gaaaagccac aatgcagcat gatgcattag |
| 75781 | acaactggtc ttgaggcaaa agttaaggga catcggtagg accatgacaa agatccaagc |
| 75841 | cttgggacta gggcccRtca ctcagggttc caaagtcctg acataactga atggtatcca |
| 75901 | actcaagccc attcacatct cagcttccca ccttgctgtc tgttactcaa cctctctgag |
| 75961 | cctcagtttc cttgtctgta aaatgagaat aataacatgt ccctaatgga cttatgatca |
| 76021 | taacatgagg tgatgtgtgt aaaatgcctg acacttacta gttgttccgt catctctttc |
| 76081 | cctctttcct cttctacgtg caagataatt ttatttctaa caaggcagga aaaatcaaag |
| 76141 | acctaaataa gtaaactctc ccaataagtg gtacatgact catgaattca cattcatcct |
| 76201 | ccctgaccat ggatacatga cttggtcttt gtgtgccttg ctgtcctctg ggggatacag |
| 76261 | cacctgcctt gcagggttat tgtgaggaat gaatgagata catgtggcat gcttagcacc |
| 76321 | atgtctgaca cacttaagga atgcaagcaa gtaccattgc cactgttgct gtttggtatg |
| 76381 | tgggtctttt caatcctgca catttctagg taattaggcc caaaatgcga gagaaataaa |
| 76441 | agagattcag agacagScaa gagacacgtg gagccccaat cctagggcaa tggcttggca |
| 76501 | aataaaaggg tgccacactt gtctagattg ccctccacag ctttctctgg ctgggtttta |
| 76561 | tgactctgtc ttatttccac aattgcacca gaagttctcc cagggctgag accacgttat |
| 76621 | ccctttctgg aggcccagtt acacttctcc caacaactgg gtgcatgtac agtaagtgct |
| 76681 | taataaatat tcataatgag cctgttcaga aggatctgtg tcccatatct aagatttagc |
| 76741 | caaggatatg ccagggccag gtcaggctct gatagttact gctgatgcca atgacacccc |
| 76801 | acaggcagtt agcttcacag tggtggcaaa gtcccatcac atgggctcag atggaaccat |
| 76861 | gattcagatg agtcatctgt ggtcacagac atgcctgtgg gcccaaatgg gacagagatg |
| 76921 | ggacattagt gctcacaggc atggtgccaa acattcacat tatctcattt aagactcaca |
| 76981 | gcaatcccat gaagtcagga ggattattac ccccgtttta tagatgaggc aactaagaag |
| 77041 | cagaagtgta ggtaagtggc ccacatttgt accactggaa gatggcagat tgccagggtc |
| 77101 | accattcaca ccctggactg accaactccW cagccattcc ctcagccaca gggtcaagga |
| 77161 | tgtagatgac ctttgaggcc agaaaatgag ccccaagtat cccctgcaag gaccagagca |
| 77221 | actctatgga ttctttgcta tataatctga aaactgtcta gttaaataat aatttctcta |
| 77281 | aagaacacct gttactagtt tccaaattta ctctttgaga aggaagaagc agcccaattt |
| 77341 | cccagaaaga gctctgtatc taaactttcc tctgtctccc ctaataacaa aggctggatt |
| 77401 | tctggtgtca agtttaggta cgcagttggc tgtgtaggct ttatggcttt tcagtcacct |
| 77461 | ttcagagtaa tctaaaattt ctaagcttgt ttcaaaggta attttcactc tatctcttaa |
| 77521 | agcttttggc cgccctcaag ccatatgtta gaggacaaga gatgtcagaa gactaacatc |
| 77581 | tgttagatct ttcccaacag tgtggcaatg acatcatatg cttcttttag ataatttgca |
| 77641 | cattatcaga ctaattttca gattatctaa tcagcagaca ttacccttaa tcaacttggt |
| 77701 | tctccccttt cagctctgca gagtacaaca tgccctccaa aggcgtgcta gagctggggc |
| 77761 | tcttttttct ctcaacagag gtgaaaagcc taactttgca ccaggcatac cacccttgca |
| 77821 | caaaaggctg agacctccag gaacctagaa gaacccatct tcaattccac agacttgaaa |
| 77881 | aatcagctgg aaatacattt tatagactca tattttttta aatttccctc ttaggagctc |
| 77941 | tgagtaYgct atagagagta tgttatattt acttatgcta ttaaataaaa gagatacaac |
| 78001 | atataacaat aagactccaa acagatgttt tttaagttat ttgtttttgc cttctagtaa |
| 78061 | ttgctactct ggcttcccac tgtctatagg aataaagact acacagaggg gcatagaaga |
| 78121 | cgcttcccac tgtggcccct gattacattt ccatctttcc tctgcatccc ctaaatccaa |
| 78181 | cattactatc agacccaaag acttccaatt gtctgaatgt gccatgctat ctcatacctg |
| 78241 | cctgccttca tgtacagttc cctctacctg ggaagccctc tccctcctaa gaaattcctt |
| 78301 | ctcattctcc aatggctaac ttgaatgtca cctcttcRgt gaagcctttg caaaccccct |
| 78361 | aatgcagtag tcctaaagct tgagtatgca ccagaatgcc ctggagagct ttgtaagacc |
| 78421 | cagactgctg gcccccatcc ttggagtctc tgtttcagga catccagtag aacctgagaa |
| 78481 | tctacatttt caacaaggtc ccaagggatg ctaatgccac acttggaata ccactgccct |
| 78541 | aaggcataga aagtaccctg tgcccttgag tcctgaactc cctcacggtt ctgtacacac |
| 78601 | cccattgcac actcccactc aagactgtga gctcaaagac agggctgagt cctatttatg |
| 78661 | cctgtcctcc ctagtcccag catatagaca atattcaata catggttatt acatggatgg |
| 78721 | gtggatggat agatggacag atgagatgga tgatggatgg atggatggat ggatggatgg |
| 78781 | atggatggat gggtgggtgg gtgggtgtgt gggtggatgg atggatggat ggatgggatg |
| 78841 | gatggatggg tggatgggtg ggtggatgag tgggtgggtg ggtgggtgga tggatgggtg |
| 78901 | ggtgggtggg tgggtgggtg ggtggatgga tcgatgacgt atacacggat ggatggatgc |
| 78961 | atggatggat iagactgaat ttatttacac agcttttcat ccaggcccag gacttcataa |
| 79021 | atgtctatcc tcactctaaa aattacctca aaaacatcat ctataatcaa ttcccactgt |
| 79081 | gcagagaagg taaaaagaag ttcaaagagt ttaacatcac aagcctatgt taagggggtt |
| 79141 | ttgaattcta gtccagagct ctttctgcta ctctacccca ctggggctcc ctaccaaggc |
| 79201 | tgcatttaag tagtcacaat ggtatgcttc tgagtgtatc tttcagagtc ctatcctccc |
| 79261 | cagctgccct cccttcattc atgtatgtgt acatctatgt gtaggtgtat gtgtgtgtac |
| 79321 | atatgcatgt gcacacacac agtcatttat ttcatttgca aaaagtaggt gaaggtggta |
| 79381 | aaagaaatgg aggccgaaga ggcacccagc ctcatgcagg gagagggtgg gatgcagccc |
| 79441 | acatgcagag gaccccatca gaaaagcact atttcccaga ggggagtgtt tgagctccaa |
| 79501 | gcatccctgg cttcctgtag ttgaggcaga gaggcaaggg cacacaggaa aggggacaaa |
| 79561 | cgtacaggaa acacaagaaa tgtatactca ggagaaaatg agagactgag ggagaaacaa |
| 79621 | aggcgYgaga gcatcagctt gggggccagg cgatcaggag tggcagtgga ttgctgagct |
| 79681 | tgcagcacag ggcagcatgg gcgggggcgg ggaaggtcag cgccggctcc agcagtccac |
| 79741 | tctgcccttt cagcagcagc accaggcgcg ggatgagcca tgggctctgc tgaagacaaa |
| 79801 | gctggggggc gatagagcaa gcgacagcag gaggaccaaa gtcaaaaggt cgctactgct |
| 79861 | gcaggtggtg caaacccagc tgcccttggc cctgcaaacc ctgtgtctgt aaggctgttt |
| 79921 | ttccattagg cctccgctca catgcagctt gggtcaccct gcagctctgc taaaggggga |
| 79981 | aaaagtcagc atttccactt cactggtgtc cagaccttct cctgggggag ccgcagatta |
| 80041 | gcctcttgga ttaagctctc ctacctgccc ctcccctcca aaagcctcac caagggagga |
| 80101 | tcacgaagct gagaccttag gatgctgccg agctgtcact tccaattcag cacacagccc |
| 80161 | cagtagcatt taggggcagg atggatggga gccaccccct atccccaaac agtgggagca |
| 80221 | gctaatgact aggtattaat gatgctggca attagtgctc acaagaaaat agtcgggggg |
| 80281 | ctgctcacca ggggaatgtg ggagggagca gagcacacat tcggggcggc gagcaagtca |
| 80341 | gcggcgtgtg tggtgcagag aacctgggac gaccagctgc ctcatgggtt tgtccagaga |
| 80401 | aattgggggt gggggaaagg atgttttctg caggcactaa aagcctttct gctgtaccct |
| 80461 | ccccactagc aaaactgggt taatcacaga gttttcRagg agggcactgt gagatgtcac |
| 80521 | taaaaaggtg tttgtgagga ttctggaacc ttcttcgtgt ggggaggccc cggatccRcc |
| 80581 | tgggaatacc tattattttc taggaggttt taaacccttg gccaggcaaa tgatcctttt |
| 80641 | tgaagagccc actttctcat cagcagggtg agaaagagaa aaaggggagg gggagttgga |
| 80701 | gtgtgtgcca ctcactgaca agcccacaga ggtgagaaca agccacccat gaaatttcgt |
| 80761 | aggcagacgt ctccacatct ccacgtaggg cgaggggaga caggcacagc ttctttccca |
| 80821 | agcaaggctg tgtggcctca aggggagaac actagaaggc caaacacacc cgcccacgag |
| 80881 | ggctcgtgag aagatccaca cccgagtgct tgtctcagaa gtcaaccaac cctgagggga |
| 80941 | ccacagggat cactggggag actgcctcct tctacttcgg gtctgcagca cacctccccg |
| 81001 | tgcagccaca aacaccaagc acatggacgg acacatatgc acatgtgcac acacgcatgc |
| 81061 | acacatatac aaaaacacac acacacgcag gtacacacac aatacacatg cacacaaaca |
| 81121 | agcacacaca tgcacaaaca acacgcacac acatgcacgc acacacacaa Mgtacataca |
| 81181 | caacacgtat acacacgcac acacaacatg cacgcacaca cacacacata cacgcacaca |
| 81241 | caSgcataga cacacacaca cccggctcat aatgaggcta caggagaacc aaggaaaatg |
| 81301 | agacacagac agacaagaag Mattccaaac cccagggcat gaataaagga acaaaatggc |
| 81361 | ctgacatttg agaagagata taaggagata agctagcaca ggggagtgag aaataaggtt |
| 81421 | accaagctaa taaacacttt agagagcgcg acaatggcga agaaacactt ttcagggagc |
| 81481 | aaccaaaatc aaaggagatt cttctcagcc tcctcatggt gggagacaac agctccgtgt |
| 81541 | gacctcttgg tcacttagac cagggaaaag aggagagaaa gggaaatgca agtattggct |
| 81601 | gcctcagtac aggtcagtat cttttccttt ttgaaagaca agggtgactg gaccaaggaa |
| 81661 | agctcttccc agagagaaga cctcagtgtt ggagctcctc aggccctggc aaggagaggc |
| 81721 | gggcaaggct cggggggcac ctcctgctct gctgttcagg ttctgtccag gtgacaacag |
| 81781 | caggtgagaa agcaagggtc tgtcgcacta aaggcttgca ccttggaagt gagcaaaaat |
| 81841 | tcaagaaggt gctgaaggct gaattgcatc ccctccccac tcccaaattc ctatgttgaa |
| 81901 | agcgtaaccc atggtacctc atactgtgac ttggtttgga agtagggtcc tcaaagaggc |
| 81961 | atttaaagag gtaaagttaa aatgggcttg tcaggataga ccctaatatc caatctgaca |
| 82021 | ggtgtcctta caagaagagg aaatgggctg ggcgtggtgg ctcacaccta taatcccagc |
| 82081 | cctttgggaa gccaaggcag gcggatcacg aggtcaagag atcgagacca tcctggccaa |
| 82141 | cgtggtgaaa ccctgtctct actaaaaata caaaaattag ctgggggtgg tgatgagtgc |
| 82201 | ctatagtccc aactgcttgg gaggctgagg caggagaatc gcttgaacct ggaaggcaga |
| 82261 | ggttgcagtg agccaagatc acgccactgt actccagcct ggcgacagag aaagactccg |
| 82321 | tctcagaaaa aaaaaaaaga agaagaggaa atgtggacac aaaagcagat gccacagcac |
| 82381 | gcatgcacag agggataact gtgcgagcgg acaggagaag gcagcatctg caagtcaagg |
| 82441 | agaggaaacc aaccctgcca gcaccgtgac cttggacctc cagcctccag aactgtgaga |
| 82501 | aaattaattt ctgtggttta agccacccca tctgtggggt tttcttatga gaaccctagc |
| 82561 | aaacccataa agaaggcaat attacgaggg gaaagtgggg tggaggttaa gggagacccc |
| 82621 | acactaatct gaaSaatggt cttggccaca ggtgtgttct ttatttcaaa tctttggtga |
| 82681 | aagtggccag tggacatcag ttgactaagt cgttggctaa cacgcatcct ctaatcctag |
| 82741 | agtctgaata ttttaaacgt ctgatccctt tcactgcatt gagttgttca ctttcagaac |
| 82801 | acctaccacc aaatcttctg aacaaaatga aaaacacatg gcctgtccac gaatattctt |
| 82861 | cactgagaga tctcagtgtg gcccacatct tcaagcaggc tctaaagatt ccattatccc |
| 82921 | atttccatgt tgagatttct gcaggcccag agaccataag ggatgttcta gaggaaagtc |
| 82981 | aaatggaaaa tgctaagccc ctttggattc cctaattcat aattggaagt tgaggtaaga |
| 83041 | aagcagagaa acggaaacac aaaatcttca ggatcatttt gggtcttgag agcccaacat |
| 83101 | cccaaacgac aaatccaccc agatcacatt tgccatttga atgctgaagc aaagaacatg |
| 83161 | gggtctccag gcagcatttc taaggcagga gagccctgta ccaaaatgtg atcccctccc |
| 83221 | ctctacaaca aaaccacagc aatagataag aatattctaa ggcacttcRt agccaagcag |
| 83281 | gcatttcgaa tgtgtgtctg aactgacaca cctattacct atgcccaacc cagtctgagt |
| 83341 | ggctggctct tcaggagtga gggaaaagag ttgtaggtct ggcatctgac agtggccagg |
| 83401 | taaggacttt ctcttctgct taacactcac cttccttcct ctgggagcag agcagggtgt |
| 83461 | gtgagcccag ccctgctatt gctaagccta gggttgggct gagctgcagg ggcNgctggc |
| 83521 | tggctggctg aaagggccaa cacactacag cacattgaga ccactcaacg gttgctacca |
| 83581 | gaagatgcca gcagtgagaa aaaggaacaa ggaacgctcc ccagcctgtc taacccactt |
| 83641 | cttcactgcc ccaacctaac aagtaggcac tcacgcctgt ggttctcatt tctgtggttg |
| 83701 | ggtggggacc gagtctcctg gtcttgagct tcatccccct cctcgctggc caggtgagtg |
| 83761 | tgagcatagt ggtagctgag ccccggtcgg ttcttgtagc gcttgccaca gactagagag |
| 83821 | gaaaagagga aaaaagggag agatacaaat attagcaacc tgtgcagcca ccgctatcat |
| 83881 | tctcccagac agtgatccca tccatccacc ccagagccag gcttccctta aaactgtctc |
| 83941 | ccatcccaac atccctttcc cccacccaac agaaccaaca cccttgtaac aactcaggtc |
| 84001 | atggaaagaa aaactgtaaa agtaaaatat gaggttaaga gctgtgtgag cactccaccg |
| 84061 | tttctagctg tgagacccag ggcaagtcac ttgacctctc tgtgcctcag tttcttccga |
| 84121 | gataaaatgg gaacaataac agtacttacc tcacagggtc attgtgataa gtttatctct |
| 84181 | atgcaaagta cttaaaacaa tatcaggcac tttgtgaggg taattgttat gacgttgaat |
| 84241 | tcaaagggca ctgggaatct acccaatcca acatcccatg acacagatga ggcaagtgag |
| 84301 | acccagcaac accaagtgac ttgcccagga gcacacaact agtgtggcag agccaccaga |
| 84361 | acccatgtct cctgggttcc tgtgcactgt cccttccacc accccatggt tggcctctgc |
| 84421 | aagaagtaga aaagttttat ctggataatc cttttgatgt ctcacccagc gattttgtgc |
| 84481 | cagaaacaca tgctgcactt ctaccatgaa cgccatggag ttaaagcatc cttggtgagt |
| 84541 | gtagtcacca agagcttgtg cccctgatgc cccagggcag ccaaatctgt aaaaggtgct |
| 84601 | ctcacaagta ctacctctca aatggggcag tttgagccaa gggcagcgag caatcgaaat |
| 84661 | gtgccttctt ggagccagga agaaagggca gcagttctgt tggttagatg ctcagttcct |
| 84721 | gggaagcaga agtctggcta aatggctcaa ggtcacacta ccaccctcaa cctccccaca |
| 84781 | tagggatcat tatctcggcc cctaggggga cggcattgct ggtagcagaa acctcgagag |
| 84841 | tcttcccagt gaaatgtcca tgccaacctt ctatgcttgt cccccagcct gggtccccat |
| 84901 | cagagcaaac caacctgctc tctgctggag tgcctgaaag ttacaaattc taaaagactt |
| 84961 | ctcccttgtg ctgacatgac cacgtcatac aaggaagcat aaatgcttca caaggtggga |
| 85021 | agagcacaac tttagcatca ggcctgggtt caaatcccag ttccagctgc tgaggttcac |
| 85081 | tggctgtgtg gtcctgagag tatacagaag tgctgtcatc cagtcatctt atccaatacc |
| 85141 | cttattactt ctgatagagt ttctcttcct accagattct cttggggttt ttcagtagac |
| 85201 | aaacattggc caaaataatg tcacctcttc ttccccatat ttacataaac tattttatct |
| 85261 | tagcttagat catttgtaag aaccaccaaa acaatatctt caaatggcaa aagcaagcat |
| 85321 | ttccaatgtt aatgaaggtg gatttagtgt ttcactgttt agaacgRtgt atctggctaa |
| 85381 | tttttagtct ttaccaaatt taagtagttc ttcttattcc tgYtatagag ttttattata |
| 85441 | ggagaatttt atcaactacc ctttcagcat ctactataat atgattctcc tttagttggt |
| 85501 | tgataaggta aattacgttg atttcctaat atttcctatt attgaaccat tcttgcattc |
| 85561 | ctagaatgca ctccatttgg tcagagtata ttatttattt gatatactgc tgcattctgc |
| 85621 | tttctaatac tgcatcttga atctgtacta agacttgagc tcaatctata atttttggac |
| 85681 | tatcttttat taggtttcaa ttttatggtg atgttgattt ctaaaaatta actgaagagt |
| 85741 | tttgctgcat gaaattggac aagctgcagc tctgtgcctt ttcttttatc tgaaaatgag |
| 85801 | gataacagta cttatcttgc aggatgggta aaggtattat aaatagcatt tgcaagcagc |
| 85861 | tctctcaata cccagcacat aatagatgtt caataaatgg taaatgaggg gcaagggctg |
| 85921 | tcagcatttt ttgctgcatc ttaggtactg gatcttcctg aaaagaggga ctttgaccct |
| 85981 | tgcctcatat tataaaatct ggcaaYtggt tggacttctt tgttaaggta agatgagagt |
| 86041 | ctgaaattca agttggtgac ccagtgacta taaattcaag gcccaatgtt tagctcccac |
| 86101 | ttataagtag aacatatggt atttgatttt ctgtttctgc attaattcac ttaggataat |
| 86161 | ggcctccagc tgcatccatg ttgcaaagga catgattttg ttctttttat ggctgtgtaa |
| 86221 | tattccacgg aatatcctga acactgggta cacacagacg taaagatgga aacaacagat |
| 86281 | gctggggact ccaaaagggg gaagggaagg aagagggcaa ggcttgaaaa cctacctatt |
| 86341 | gggtactatg ttcactaatt ggatgatggg tttaatagaa gcccaaacct tagcattatg |
| 86401 | taatatatgc atgtaacaaa cctgaatcta aaaaaataaa aaattaaaat aaataggcct |
| 86461 | atcattggct acttacattc atatattctc tcttcctctc tctcataaat attgKaaaaa |
| 86521 | aaataaaatt aaaataaaat aaaatagtgc tatgcatctt aattccatgt gactcaggaa |
| 86581 | gctggaccca aagaggcccc tgaggtgcac tctggatctg cttgtggctt tttctattta |
| 86641 | gctttttaga taatctgaag ttaatacaca gcaaattatg gggtcattgc atataaatcc |
| 86701 | atttagttgc caggcatact gttagtaagg aataaatgct tattaaaagt aatgataatg |
| 86761 | atatcagtat ttacacaaag aggcctcagc cacctctgca gatccccagt ataaactcac |
| 86821 | agcatttcac ttgtgccatt ttgttatgtc aatcatcact gttgcttaat cacacaattt |
| 86881 | caggatctta atggtcattt tgtctatcta gagaagtgtt ttattcccaa taactStaga |
| 86941 | aggctgttct ggacaactcc attgataggg aactcactac cagtcaaagc aggcatttct |
| 87001 | cctttagact ccttgaatta tggctatgtc tgcactatgt ctcttaagga cagtttcata |
| 87061 | tcaatttcat cttgatatca acaactccac cttatatgtt gacatataca tactacgcct |
| 87121 | tcaaaacata tttgttgagt ggctcatgaa tgaatacaga accattttgt gggaaggcca |
| 87181 | ggagatgggc gaagaggcaa RttgYagaat ctaatccttc tacccacatt aagctcagac |
| 87241 | taattgttct taaaagtcta caaaaccaaa cctaagcaaa aagctccctc tatctccttc |
| 87301 | cccaacatgg tagaaagtaa taatgtttag agcaaatcct tttgctagaa cagagattct |
| 87361 | caaacagtgg tccccagacc agcaccatcc acatctcctg gcaacctgtt agagatgcaa |
| 87421 | actcttgggc tccaccccag actgactgaa tcagaaactc tgggggtggg gcccagtgat |
| 87481 | ctagattttt aaaagccctc taggtgattc tgatgcacac taaagtttga gaaccactgg |
| 87541 | gctagaaggc tggatctatt taggcttggc tccaccaacc ctatgtccac atgcccttct |
| 87601 | tgatggatgg ccgtagcagg caggggcagg ataggcagcc ttgagacctt tgttcagtta |
| 87661 | ttagcagtta ttagcagaat caggaccaga caatacatgg aggtcccaga agccagactt |
| 87721 | cttcatgaag agccctctgg atggagctcc atttttaacc gggtatttgt accatgtcat |
| 87781 | tcttctatca ccaggtcttc aattcaagaa atatttatta gacacctaat atgtgcccca |
| 87841 | ccctgtgcca caagaaggac aaaaatgaac aagccccaga cccctccatg gaggaggtcg |
| 87901 | cagtctagca gagatctgca tgtaaacaag ccagggggag gtgggttgga tacagggtga |
| 87961 | gaccgtgcca ggcaaagagg gacatcaaag aggggacagg aaactggctt gagtgagtag |
| 88021 | ggtagggctt cccagagaag gagcccctga catgagcagg acttcagcag gcaaaggggg |
| 88081 | ctcaaagcac atgcagttat cacctctgca aactgcgaga agtctaacaa agttgaagag |
| 88141 | gtggagcggt gggggtggat gtgaggaaga ctaacaggag aggaagctga gcaaggcttt |
| 88201 | atcctgacaa tggggcagcc aggagaggat tctatcctga ggaccaagtt aagcagactg |
| 88261 | acatgttaga aatactgctt aagattgtag ggcagaatat ggatttgaag gtRgcgaggg |
| 88321 | gctatttcaa ttgtttacct gtgcaacaat gaggacttgt gcatggagag gaaaaatggg |
| 88381 | gtgggagagg ggttaatgag agaacttggt ggaaaaggga gtgagtaaga aagcaaggag |
| 88441 | gaacccagaa agactaacat ggccttcctg gccaggcctg acccagcccc acccacctct |
| 88501 | ccagcctctt ctgacaccac gttctgcctc cacacagccc ttctgctcgc tggccttttc |
| 88561 | gtttattata gatttctctt cccaccacag agtcttcaca caagctcttt cctctgccta |
| 88621 | gaatgtcccc atccccaatt tgcctgatta aggtctaatc atccctctga tctcagttca |
| 88681 | aatgtcctcc cccagggaag tctttcaaat caaaattaca accttagttt tttgccttcc |
| 88741 | taggactaat cacgtgtcaa tacagacagt ccgcaattta caatgctttg acttttgatt |
| 88801 | tttcagcttt acaatggtgt gaaagcaata cacattcgat agaaaccata cttcaaggac |
| 88861 | ctatacagct gttctgtttt tcagttcagt attcaataaa ttacatgaga tattcaatgc |
| 88921 | tttattctaa aataggcttt gtgttagatg atgttgccca actgtaggct aatgtatatt |
| 88981 | ttcaaagtag gctagggctg ggcatggtgg cttacacctc taataccagc actttgaggg |
| 89041 | gccaaggtgg gaggatccct tgtgcccagg agttgaagac cagcctaggc aacatggtct |
| 89101 | ctacaaaaaa tacaaaaatt acaaaaaata caaaaattag ccacgtgtgg tggtgcgcac |
| 89161 | ctatagtccc agctactcag gaggctgtgg tgggaagatc acttgagccc aggaagcaga |
| 89221 | ggttgtagtt agctgagatc acaccacggc actctagcct gggtgacaga gcaagaaaaa |
| 89281 | acataaaata aaaaagtagg ctaggctaca ctatggttta gtaggtttgg taggttaggt |
| 89341 | gtaagacatg cattttcgac ttaggatatt ttcaacttat gatgggtttg ccaggacata |
| 89401 | gcactaccat aagtggatga gcatctgtat gcatctctcc cactggcagc aagcatggca |
| 89461 | ggtcctgtgt atccgcNgtg ctgtgtcccg atgaccagca cagggcctca cttgtggcag |
| 89521 | gtgctcaatg tcagctacgg aaagcaaaga gatgcacatg tttctgacgt gggcaactgg |
| 89581 | gtagaaggat gaaggaggaa aaccagattt aaagaaggaa gaaaatgagt tgagttcacc |
| 89641 | taaagcttgg gaaagagacg tagattttgg agctggcagg gtggcaatgg atgttataag |
| 89701 | tatggggaaa agtgtcagga agagactgtg gagagagaaa agaggtgcct acacaggata |
| 89761 | gaactcagaa aacaccagga tcttaagaaa ctggtggaaa aagagaaact gattttttaa |
| 89821 | aaatttgttt agaaagggtt gagtgtggtg gctcatgctt ataatcccag cactttggga |
| 89881 | ggctgaggca ggaggatcac ttgaggccag aagttcaaca cccatctggg caacatagca |
| 89941 | aggccccatc tctgcaaaag acaattcaag attagccagg tgtagtggca tgctcctgta |
| 90001 | gtcccagcta cttaagaggc tgaggtggga ggatcacttg agcccaggag gtcgagggtg |
| 90061 | cagtgagcca tgattgtgcc actgcactcc agcctgggtg acagagattc tgtctcaaaa |
| 90121 | aaaaaaaaaa aaaaaaaaat tagtaattgt taagaaaaac tcacacagga gtgagcaaca |
| 90181 | taagccaaag gaacagggtt tcaagacgac agtaacaatg acaccaccag tcacaggtcc |
| 90241 | tgYcaacagc tattgagtgt ttaccacgga ccaggcccac tccaagtgct tcaagtaaat |
| 90301 | tgactcacag caacctgcat ccccatttta aagaaagatg aggagattct gcaccgaggc |
| 90361 | agagccacag taataaatta atcagatgcc tgagaagggt caagaaggtt ggagactaag |
| 90421 | agaccactgg atttggaaat tgggaagttg ccttagcaag aagagaatcc acaaagtcga |
| 90481 | ggagcacaac tgcagggtgc tccaagaaat gaggaagtgc tgatggggcc agctgtggga |
| 90541 | ggaggaaaga gggaggttgg tgggtggagg ggagcttagg atcagggcag accagggtgg |
| 90601 | agcctgtgtt ttaccagcct attctgactc ccaagtctta gtccttggaa tgatttcatc |
| 90661 | ataggggcaa gaggaagagt gaagacttcc aagagttatt ttggttggat tgcatcagga |
| 90721 | tgaaactgct tcatYacaat ggaaagaaac gtcttgaaat cctgctttga ctggcttaga |
| 90781 | aaagccagca ctgtttctcc ttctgtgttt aatcatgtct tcctgtcact gcaaacacca |
| 90841 | tgggccagct tcgtgagcct gtgacctgtg cttccagaca gggtccgagt tcagaaaggc |
| 90901 | cccacacttg gtttaatgcc ctgctgttgg catcttgaaa ttcttaatat ttattgaaca |
| 90961 | agggcccccg cattttcatt ttgcagtgga ccctacaaat cacgtagcca gttctagaag |
| 91021 | tctgttgggt tcagagtgga gatctgagac taagttactc caaatagctg acctgatagt |
| 91081 | ctgagagctg ccaaggtgaa cccaggtccc aaccagtcct gagtcaggca taaaattccc |
| 91141 | ttctgagata atcttgaaag tctggccaga gtgattagct gctcagtagt catcatctca |
| 91201 | gtgccatcaa ccacccaggc ctggcttcta gatcggctct gccctcagag aggcagaatc |
| 91261 | tgcagcaggt aagtgggcag gctggatctg aactgcctgg gttcaagtcc cagctctgct |
| 91321 | gttgactctg tgatcttggg caagttacta atcctctctg tgcctcagca tcctctctgt |
| 91381 | aaaacaaggt ggatcatgac agcacacctg ctccccgcgg tgagacccat atgagagaat |
| 91441 | gtatttaaaa caaagcccag ctcatgggga gtcgtggctg ttctcagctg ctctcatcac |
| 91501 | cactgctgtc aaagtggccc aacaaagaga ataaacccca aagtggggag ttatttctcc |
| 91561 | tctgaagtct ggagtggaat agcaaggaaa agagggtggg aaaagaaaca ttttgaaaat |
| 91621 | aaagtactgg aaccatctgc tctcctttta tcatgtcggc attctcactc tggaaatatc |
| 91681 | tgtcgtgcgg aatcagcctg agccccagga gcgctgaagc agcagagagg gtcatgcccc |
| 91741 | atcttcccac tccagtctcc ttccccgggg gcaagcgctt ttgcaccatg cacctctgaa |
| 91801 | gccaccaccc ctgggaccag tcagccctgc ctgtgcacga cctaaggtcc ttcttttcac |
| 91861 | cttggcaagc gtgcacctgg attttgtgtt cctggcatgg tgcacatgga gagcagtggc |
| 91921 | tgtgacaata agggaggtcc agcttgcctt ctctttctcc ttccccctgg ggcggatcca |
| 91981 | tctgtcaagS tgcagaagga gtgtttgccc acttcccaat ccagaactgg attctgcatg |
| 92041 | caggacctcc tgtctggagt tatggatgcc ttcagtgccg ctccaaaata tttactgcac |
| 92101 | gccccctgcc ctccttcaaa cctaccccac tcctagtctg ggcgggggtc ggggggagca |
| 92161 | gggaggagga ggaatcaggg gcagcttgtg tgaacaaagc cgctgcagca gacagcagaa |
| 92221 | tccttcctgc cggggagaag cggctgcctt ccccactgat aacttaatga ctctggcaca |
| 92281 | ttttcatcag cccaacttgg agcacacagt gggaatctga gccagtggtt tccgagagac |
| 92341 | tgaaagcagt gactgaaggc aattacagga tgagcatccc agagacaaag cctgggccct |
| 92401 | gggagtcacc agccagtcac cagccacagc tcattcccgg ctctgccccg tggcactgac |
| 92461 | atacaaccct gaggacaccg cttccttctc tctgcagctg gacttcctca tctgtcaccc |
| 92521 | agaccccacc atgcctgtca tctgccgatg cctccaaggc atcacaccta ccatcaggca |
| 92581 | gcacccattc ccatgcagaa tctcacagct caggaggcaa ggatccccat tccacagatg |
| 92641 | aagaaactga gtctggggga gtttaagcaa ttctctggat ggcacagcca gagtttgagc |
| 92701 | cctggtctgt ctgcccttga agcacgtgac tgaaaggtgc gctggtgagt ctctgcttgg |
| 92761 | cactgcctcc ctccccaccc accccaacgg cctggggctg actggcgtgg cctgcttcac |
| 92821 | ccatgctccc ttgctctcgg caagaaggag gcaccagcag gagaacggag ggtgggaaRR |
| 92881 | aaaacacgtg gggacttggg ccctgccctg cctgggcact gtgctataca ggggctgtat |
| 92941 | aggggcccac ctccaagact ccagtcctgc ctggctctgg gaaccccatg tctcccctgc |
| 93001 | tccttggagc tggggatagg gagggcttcc cgctctccct gtcagcacct tcatcttgcc |
| 93061 | cacaccttca taatcactct ggcatcaaat tcccttccat ccagcccttc tgagtggaat |
| 93121 | cccacatcct gccggatacc atttggacac atattcacac cctaccagac cggctcgtag |
| 93181 | aagtttgggg ccaccaacac ctcccaacga ccctccatct tctctctgca gaaccatctg |
| 93241 | ggggatggag gcattcctac aaccaattcc cccgagcagg gagaagcccc aactgagaaa |
| 93301 | agccctgtgt gactcccaga tacaaactca gatcgggata aagcccagga ggtacttcca |
| 93361 | aaagccacct gctcagactg ggtacRcagg gtacagKtgt tcatcccaca gccacttcaa |
| 93421 | ctggccaggc ttttctcaaa agccaacggt ggatccaacc cccaggtggg cttctcctcc |
| 93481 | ctcccctgcc cttgaagttc gaggccagca gactcggtgg ccttctagag accgggggtc |
| 93541 | tggctctggg tctgatacta acccgctatg cacccttgga caaattcata cctttctggg |
| 93601 | tcttgatttt tcttatctgc agaatatggg ggttggatca gatgatctct aagtcctttg |
| 93661 | cattctagca cttcacaacK ctctgtaggt cctgaagcta ttatctcctc aactgtgata |
| 93721 | ggaaaatgat gaggctccca gaggctggct acatccacct ccccccaccc caccctgcac |
| 93781 | gattggcagc tgccgtcccg tggcttcata ccttctttca ggccaccctt gatgcttatt |
| 93841 | ttaagctgaa ttcctttgga tggagacaca ggggattggg ggtaggggtg gggtaaaaca |
| 93901 | ccctgatttt tcacagccac atttcttggg gcctggtggt gacccaggat ctatcaaact |
| 93961 | ccagtgaccc aaaagtcctg tgtcttcatc aagggagagt gtcctgctta ttttgggaat |
| 94021 | ttactagatg tgaggaagaa cagagacaag caaccagact ctcgtttcaa aatattctat |
| 94081 | cacctgattt ctggatcctc agcagggaaa tgcagaaacc ccccaaaacc aaagcactcc |
| 94141 | atgtgttatg ggaatgtttc ctgccctgct gagaagccgg gtaacagaat gcaggtgaac |
| 94201 | tcgggagtct gccttcttgg gtcagctgat ttgcaatgtg accttgggca agtgacttag |
| 94261 | tctctctcag cctcggtttc ctcgtctgta aaacaagggc aataacagtt tgtagctcat |
| 94321 | gggggaggtg tgagaactgc aggagttcat cttcttacaa tgctcagccc agtgcctggc |
| 94381 | acacagcaca tgttcaacaa acatcagcta tttttgatca ttcatttaac ttgatcagac |
| 94441 | aactccctta gatcctgcag cagctagggc acagaacaca actggggccc cagcttaggt |
| 94501 | gttaaataag taccttttct tgattcagta taaagaaaat aaacatttat tgaaaatatc |
| 94561 | tatgaaccaa gcagtgagct aattgttttt acacaatttc tcattgaacc ctcttggaaa |
| 94621 | cccactaagg ttaatattat tgtcctcacc taacagacca gaaaacaaag gctcaaagtg |
| 94681 | gttttgtgat ttgcctgagg tcatggctag gaagtgacct ggtaaagatt caaatcctag |
| 94741 | ctttctgact ccggagccac cttcttccaa ctggcatccc tttcagggtg gtgtctttga |
| 94801 | ttcctgattc tagtgagtcc tgcgttagca tgtccttaat gagcttaaat taagagtgaa |
| 94861 | actgaattct cttttcaatt gtacaataaa aataatttaa ataataaatg tcattgtcaa |
| 94921 | catttctggg gaaggtaaaa agagaaaggt caaaaatcag acctgattac cctaagctga |
| 94981 | ggcagccccc aggcatctgg gaatcctgct agcatcctct ctctcaatat ctctgtacac |
| 95041 | ctcccatgcc aggacatcag tgcggcctca aatgctgagc aggttttatt tgtgagttcc |
| 95101 | aggctatcca gtgtgattcc ccaccccctg cctgaggtag gccttcttcc acctacaatg |
| 95161 | tcagtgtaag ctcctcagtg ccttagagga aacaacaact gtccattagc atctgttaag |
| 95221 | acgtttctgc ctggattcct gccatttcca ccaactcata tgtcagtttc atcacactcc |
| 95281 | caaaattact tcccctttta ggatattcca gttaagctac cccttttgtc tcaatgaccc |
| 95341 | aagtgcaaga tgtcaagagt catcactgcc acctccctct ctcctctcct gctctccaca |
| 95401 | tcctgtccat catctgccgg gttctgtgaa tttctctttc attaagtctt cttcatctgc |
| 95461 | cccgtctatt tcactgctgc tatcaccacc atccagattt catgtcttct cctagctgac |
| 95521 | tagaaaaggc tcttctcggt catcaggctt caggctttcc tccctgaaca ccgaatccta |
| 95581 | cagaYcaacc ttcctagaga tgtccctagg attgtcatga attaccacgg accatgcagg |
| 95641 | ccaacctcta agccaggggt ccccaacccc ccgggctata gactgacacc tggactgcac |
| 95701 | agcaggatgt gagtggcggg caggcaagag aaacttcatc tgtatttaca gctgctcctc |
| 95761 | atcactcgca ttaccacctg agctccacct tctgtctgat cagattagat gtcacacKgg |
| 95821 | attctaacag gagcacaaac cctactgcaa actgcacatg caagagatct aggttgcaca |
| 95881 | ctccttatga gaatctaatg cctgatgatc tgtcactgtc tcccatcacc cccagatggg |
| 95941 | accatctagt tgcaggaaaa caagctcagc tcagagctcc cactgactct acattatggt |
| 96001 | gagctgaata attatttcat tatatattac aatgtaataa tcatagaaat aaagggcaca |
| 96061 | ataagtgtaa tgtgctcaaa tcatcccaaa acctgccctc cgcccctggt ccgtggaaaa |
| 96121 | attttcttcc atgagtccct ggtgccaaaa aacttgggta ctgtggctct aagcacctca |
| 96181 | gcctgatgtt cccagcaacc ctSgtctaac tctgtgcccc caatctccct acccacatgc |
| 96241 | tctgggttag tcgagctgag ccttcttctt ccctggtatg cacatcccac attcccttct |
| 96301 | ccagacattc atcaacagtt tggaagcacc actgtgctgg ggctgggctg caagttgatt |
| 96361 | ctggcctggg ccctgccctc agaaggctca cagtccagcc tgagggagca gagaaacaaa |
| 96421 | ctgtcatcac acaatgtggg aggcagccta ccaggaggta ggcacaaggt accagcagct |
| 96481 | tccagaaagg gacagtgata gtgtgtgtgg tgggggaggg aaggagaatg agagagagaa |
| 96541 | aaaaaaagag agagagagag atgaatgact gggatcaaat cttggctcta gcatttattc |
| 96601 | actatgtgac ctcaggaaag ttaattaacc cttcctctcc ccagtttcct tatctgtagg |
| 96661 | atagagatga ccaaagcatc catttcatag cacttttgtg ggagttaaag agttaatata |
| 96721 | gatgaagcca acagaatatt ccaggtctat aatataagtc aacaaacttc agcattatca |
| 96781 | ttattacctc ttccccctac ccctgggcac acccatccac ccctgggggc caatatcaat |
| 96841 | tccatccatg cgccctaagg gccttcttgg catcccgggg ctgcactctc tgacacagca |
| 96901 | gcccctcttc Rtgtgaccac tccctgccct gttccttcag tgctcactgt cccctcaatt |
| 96961 | aaataccgcc ccggcagtgt gctatctcct gcacaatatc agcctttctc cttccaagca |
| 97021 | tattggagaa agagaaaata agaccaaggt gggggaaacc tttgtcaagc acatgccacg |
| 97081 | tgcaaagctt tttacataca tcatcacagt cagctttccc actgtgcccc atccccacca |
| 97141 | tacaccggag gacatggaga ctcctacagc aaaatgactt tctcgatgtc acagataaca |
| 97201 | agcagcagaa ccactccaaa gtcagggcac atcctgcttc acccagctct ctgcaacctg |
| 97261 | gcagacccat caggctcctt gctttcctat actccccacc atgactcaaa ataagagaga |
| 97321 | tcaaaggcca tgcaccaggc cctgcagcct cacaactgta cttctaggaa acaataaagc |
| 97381 | attatgcaaa ggtatagctg gaacagtgct tttttttttc ttttttcttt tattattatt |
| 97441 | atactttaag ttttagggta catgtgtaca atgtgcaggt tagttacata tgtatacatg |
| 97501 | tgccatgctg gtgtgctgca cccattaact cgtcatttag cattaggtat atctcctaaa |
| 97561 | gctatcccta ccccctcccc caaccccaca acagtcccca gaatgtgatg ttccccttcc |
| 97621 | tgtgtccatg tgttctcatt gttcaattcc cacctatgag tgagaatatg cggtgtttgg |
| 97681 | ttttttgttc ttgcgatagt ttactgagaa tgatggtttc caatttcatc catgtcccta |
| 97741 | caaaggacat gaactcatca ttttttatgg ctgcatagta ttccatggtg tacatgtgcc |
| 97801 | acattttctt aatccagtct atcattgttg gacatttggg ttgattccaa gtctttgcta |
| 97861 | ttgtgaatag tgccgcaata aacatacgtg tgcatgtgtc tttatagcag catgatttat |
| 97921 | agtcctttgg gtatataccc agtaatggga tggctgggtc aaatggtatt tctagttcta |
| 97981 | gatccctgag gaatcaccac actgacttcc acaRtggttg aactagttta caggggcagt |
| 98041 | gcttttaata gtaaacagat attagactgt ctaaacatct aacagtagaa cattgagcaa |
| 98101 | attacgagac atgtccataa gctgtggcac atctgcataa tggaacacta tatagcccta |
| 98161 | aaaactatgt cataaaatct atttattgac acagaaagat gttcctgatg tatcactgag |
| 98221 | tggggcagMg gggcKttaaa atggtacgta tcatttctta gtcgtcttct gtgtgcgtgt |
| 98281 | gtgtgtgtgt gtgtgtatgt gtgtatagac agagacagaa ttaatcctag aatggaatac |
| 98341 | agcaaaacaa atacagcaaa aaattatctc caaggagtga gattatgggt catttttgtt |
| 98401 | ttttcctcta tttttttttt tttgagactg cgttttgctc tgtcatccag gctggagtgc |
| 98461 | aatggcgcaa gctcagctca ctgcaacctc tgctttgcgt atctgtaatt cctgattatt |
| 98521 | ctgcaatgaa caaatactat ttccatagaa aaagttattt taaaaaaata atgaaaagca |
| 98581 | cctctacaat ggttaatatc taccctatta tgggtcatct acacagaaat aggaattgtc |
| 98641 | atgaagtgtg catcaagaaa cagttagtgg agagcaaggt tgtgactgaa tagaaaataa |
| 98701 | ctccagaggg tgtgggtcac agcccagaga aggcaggtgt aggttagaag gtcaaatgcc |
| 98761 | aagatgcgag ccctggagga gaggaggcag agacaggagg gtctagggac agcaaagaga |
| 98821 | aacttcaccc tctccccagc cctgcctctg gccagtcctg ccggaacacc tgcaacctgt |
| 98881 | gtccatgaca caatggcatt taaatattta aacagaccca gctttgctgg aacggcgcac |
| 98941 | tcagtctcca gggatcaatc ccatgccaca agccccgctc cacaaatcaa gtttctgggg |
| 99001 | gcaccgagcc tttcctcccc tccccgatcc tacccccatc caaggacctg caagacaact |
| 99061 | gagtgatgag cccagcttcc cttccgcgac aaaggcagtg agcctgaagg ccgcgttatt |
| 99121 | ggcttttcca ctgcagcttg aagcgaaaag cacgtgagcc ttaaagaata tgYgccttaa |
| 99181 | tgccctcaaa aaaatttttt tcttagcaaa actgcaagag tcatctaact ctccctgctg |
| 99241 | cactcaggta ggggtaaaac cagggtagtt tgaaagaggt tgaggtcaag cagattttct |
| 99301 | gggactgcct tgggctcaag cttttgtctg tccagtcagc agatccaccc atcccatcgc |
| 99361 | acctcttggc ctgtggcaca gtttcccgtg gtattcccca atccactgct cccttcatgt |
| 99421 | cctccagaca tcttgcctcc ctagtaaaga gcatcattgt taagctgctg cctgggaaga |
| 99481 | aaggcgccac tgtgtgggga aggagtgctg atcagggcag tccggaggcc caaaggagga |
| 99541 | gccatcccct cacggacaaa ggaggaaacc agtgccatag caactgaggt gtagaaccag |
| 99601 | gactaaacgt ccagcctgct cctcccatca gcctgatacc cttctctctg aagtacacca |
| 99661 | ctgccaagaa acaagagact ttagaacggg aagagaccct agaccctatt ctgatactac |
| 99721 | ccccactggg tgtggcaaca cactccccga ctgggtttct agaagggagg caacagggtg |
| 99781 | aagcggccac acagctgaag acgcacatct gtagggtgga ggtggtagag aacagagact |
| 99841 | ttgctgagac agaggtggcc ttgagagggc ccgctcctgg tgtgtgacac ctgacgtgac |
| 99901 | tcaggagtga gtcatgcttc taggagggct ttagccatgt ctatttgcct tttgtcacta |
| 99961 | atctagccta atgccgtagt tggggggcag tgattttaat agatttaaat ttaaaagact |
| 100021 | ggaaatcata taattccttc catcctactt caattgtaac tactacctga ctccagcctg |
| 100081 | cccgcctgat gcctagaaat tgcccatcga cagcggccag ggcttcacct cataagtaag |
| 100141 | ttgtgcgttc tcattaatta actttgaaaa tgctttttcc gcagccttca agagaatgaa |
| 100201 | actccagggt aggagagcat atgtaagggg cagttagtat ggaagatgtc ctagggtatg |
| 100261 | gcggttctag agttgaggac gctgggatca tatcccactg ttcgcatcct agatcccagc |
| 100321 | tgtgtgacca tggacaaggc cctacacctc tctgagcctc agtttcttca cggtaaagtg |
| 100381 | aggtcaactg tccctgcctc tccaggttgg tgtgggggtt tacagaaata atccatgtga |
| 100441 | aacacttagc ctagcgctct acacacccta agcacctact cacaggaatt aagaccatga |
| 100501 | ttcaRaaaac acttcgagga aaaaagaaaa cttcctacac tgcttccctt gtgtctagca |
| 100561 | aaagggcata tgcctgcttt gctcctccct gcatggctaa tgcttagaga caaaatgttc |
| 100621 | tccctgaata tcacaacgtc atcaccaact tctttgctat gatgtttctt gaacaaagaa |
| 100681 | aatggaaaag tgggtctctc atcaggagtc tgctccaatg acgctaacag aaaaattcgg |
| 100741 | gcttgggagc aattaggaag agaagaggca aactcttgaa atgactttta aaactttcta |
| 100801 | gcagcccaaa cccaaggatt ccttccacct gcctgtcccc agttatcatc ctgcctacaa |
| 100861 | aatggggcta aggatactgc taggatttaa agcgattaag tgaattaaaa atcaagcgct |
| 100921 | ggatagctga gttgtatatc aatgtgaaat aaatggaaag aatagattct aaggagacca |
| 100981 | actaaaacac tgatgcaagc cagtggcaac ctgcctggag aattcctgga gactccagaa |
| 101041 | tgtccagatg caaaaagcag aaaataataa gagctgagca gtcaggagcc agaagccttc |
| 101101 | atgtttaaat gaagtagact tgtcactgtc aaaagccagt atacacaaga atcccctgaa |
| 101161 | gagcgctcag aaaatgcagg ccccttggcc ttccctccag tgattctgat accggaggtc |
| 101221 | tgatgtggag cccaggagtc tgaattctaa gaagcgtcta ggcattgctg tgcagctggt |
| 101281 | ccgggcctac actttcacaa acaccaacag acttttccac aatgtcctat tcagttgctt |
| 101341 | tttttgtgca taagaaacac ttttccttaa gcaagagatt aaaagggaag aaacagaact |
| 101401 | ttaaccctta agcttggtaa actttcaagg taattaaaag agactggtta cttgctggaa |
| 101461 | aacaaagtat tcatacatcc atacaccatg gattgggtaa aacataaatc atgttcaggt |
| 101521 | gatttaacat ttctctgaga cggaagaaat tcaatgactg agtaaaaggc atcaagcaaa |
| 101581 | ctctctatca cctgcagtta gcagctacaa taRtattcaa gccacccatt ttgcaaagga |
| 101641 | agcttggagc aagaacacaY aggaccacta tattcaggaa Kgcattccag gaagggttaa |
| 101701 | ataaatcaca tcagaatata gcttattacc actacacata aacccagaaa ggggttgggg |
| 101761 | tccaaggtga tctaatattt tcataaataa cttgaaagat ggagtgggaa ttatgcaaat |
| 101821 | cacaccatag atgatacaaa aatggcaggg acggcaaatc tgtggagaat gaaatttaac |
| 101881 | tactgggcaa tgtctttaaa tttgccttta ttgaatcttg tatattgaag tcacatatta |
| 101941 | ttggatctgt ttattgagac tcaatgggac caaatgcaga ctgatttatg gaagaaggaa |
| 102001 | taatcaaacg cataagtaga aaagagcatg cacctggaga ggcatcgaca ccgaggctgg |
| 102061 | gacaggctcc gactagtaag ctgttgagag ggtggacagg gcataagtaa ggagatatgt |
| 102121 | ccgctgctct ttgagccaca tggacttgat gctacttctt aggaRtgcca tgcttaagtg |
| 102181 | tagacctgga agggaattcc aagcagggtg ccatagagac tatggggtgg ggccctaagt |
| 102241 | caaccaagaa tatatgggat gttcagaagg tctcccagac ggacaaagcc ctaatgtgcc |
| 102301 | tattcgtagg ggaaagatgc gcaaacgaca aggggacctg taggagagaa aatcttcagc |
| 102361 | tcctattaag gaaaaacact cattcgaagc acagctggca tcatggaaga aagggcagct |
| 102421 | tatggtaaca ccatccctag ggacgctcga ggaggtggcc agacacctct ctacttagga |
| 102481 | tgcattagag attattaaaa gcactccttg cccagtttgg gggtggtggg ggtgggcctt |
| 102541 | gtgacctctc caaaggtcat ttctatccca aaggatcaca tgtctgaagg gcaccagata |
| 102601 | aaaataaagt ctattaatca ccgagctgcc acacaatttc caaagagagc cagaacagag |
| 102661 | aagggcaatc gacggtggcc cctgctccac cgagagaggg agaggaggca gcacgcatgc |
| 102721 | ggacagagcc aagaaagcag ccgctgagac ttccagaaag cctgccgtca ggcctcccag |
| 102781 | gcactacagg gcacacagaa ggtgggagag agcctgcggg gagggcatcg agagaagcaa |
| 102841 | acgtcactga gagtcccgaa acaaagccat ggggactcag gagacagtgt gtgatgcaag |
| 102901 | cactttgcag aaagaggggt gcccagtaag agagggatgc ccacaaacag cacttcatgg |
| 102961 | agatgatcca caaggaggca gaagtcagag gcaaaggtgg gaggagagga actgggaggg |
| 103021 | gatgaagtca gagaaaaggg cacacaggtg tgtgtgtctg ggagtccatg ggattatgat |
| 103081 | gggctgggaa tccaatgaaa gctgcagaga tagagcaaaa agggatccca cggtctatag |
| 103141 | tagcagacaa ttacatacga agataaagca ttttaaaaga ggaacaaatg gctgggtgca |
| 103201 | gtggctcaca cctgtaatcc cagcactttg ggaggctgag gcaggaggat cacttgaaac |
| 103261 | caggagttca agaccagcct gggcaagacc ccatctctac agaaaatttt aaaaacttag |
| 103321 | ccaagcatag tggcatgggc ctgtagtcct agctactgcg tatgctgagg caggaggatg |
| 103381 | gcttgagtcc aggaggtcaa ggctgtagtg agctataatc ctatgattgc accactgtac |
| 103441 | tccagcctgg gtgacaacgc aagagcgtct cttaaaaaat taaataaata aaaatgaata |
| 103501 | aacgaagaat atagtagcaa tgccccagtt ccaaagcagt tgttggcatt cttgatagat |
| 103561 | gtgctggtca agccaaacac agctagaaag cccaagacgg tctgagggcc cttcccagcc |
| 103621 | catggcttac agccagtctc tcaagggtca gcatgctggg gcttctatgt atcagagtga |
| 103681 | aactgaacgc catgtaggaa gcaagaccca ggccaaggca ggcacctcct ggtgctgcca |
| 103741 | aaaggcatca gaccccatgc ccYgctcctt cctcatcctg gactagaact gctttggggt |
| 103801 | ggagacgtta cctgcaggag tcatctcagg aatggcatct gcatggagta ttaagcagcc |
| 103861 | aaatgggagt catggagttt gagttcttct agcaaaatgt tctccaacca gctgtcaccc |
| 103921 | cattggacac agaacaactt tttgaaatca aaagaggcca gtgaaggggg agacaaaaga |
| 103981 | caccaccccc agggtgctcc ctgggcccca cccctacccc gccttgccag ctctctccct |
| 104041 | gccttcaggg agactgcaga ccctggcgag atgggtggga cacccagagg gagacccgtg |
| 104101 | ccagggtcca gcctcgactg tttcactgcc atcctcgctg cagcctcttc cctcctatgg |
| 104161 | cgaagctctg catcctcaga gaggagaaga cggcaagtga agatcattag gagtgtggtg |
| 104221 | gtgagggctg ccctcccata gaatgagcaa atggtacccg gtacagtgag aagatgacta |
| 104281 | gggcacaggt tttcaatctg cctcccagtg ctctgctgtc tggagctgac cacctccctc |
| 104341 | atcaagctgc aggtttcccg aggtccaccc actgccctgg ctccctgcga ctcccctccc |
| 104401 | gtgggctccc tagctctgtc tgcacgccct aaactcagga gccagccagg cagtcgcttg |
| 104461 | tccaaaagat gtttctgaag caagcaagaa aggctggaga tagattgagg gccatttatt |
| 104521 | aaagtaagtc atcgtcatag aaagattcat aacttgccct acctaggaca ggagaggaag |
| 104581 | agggaaagga aattaaaggg aaacaaatga aaagccatgg cgagccaagt acctttgtcg |
| 104641 | gagggttttg agttatgctt ttgtttgtaa ctctctgaaa tacagaaaga aatagaggat |
| 104701 | gaatcttaaa ggagacagag cgcgtgagag agagagccgg aggagagcca cacaggaggc |
| 104761 | atggcaggag gtgggggtgc agaactgagg gtgggggcca ccccagctgg cttcccctct |
| 104821 | gcagaaaccc cctggggcag cagaggccca aggaagtggt gactgcggtg gaggcggcag |
| 104881 | gcgagtaagc tggggtgcag acagaggaag aggagagcac acactgaggt tggcaggcgg |
| 104941 | atggccaagg aagcacaggg aagaggggcc ctgggggcag gcgcacaggR aggaaggaag |
| 105001 | gtgggaccgg cccatactta ctgtcacaga cgtaaggttt gtcgtggtct tcctgagagg |
| 105061 | cggcgtcgtg cctcctcctg ccccctgcag agccgcgagc ctggggagac attggggtac |
| 105121 | aggatgcttg ttaccatggt catcactaca gctccggagc atgcgctctg cgagctcctt |
| 105181 | acaccgtctt catcccaact tttgtgccaa caccagtccc atcttacagg ggaggaaact |
| 105241 | gaggcccaga gaggtcagga gacatgcccc caaatcactc agttgctcac ctgtatcacc |
| 105301 | tcattaaatg ttcacaacKc caagaggtgg tttctactag ggtccccatt ttacaaacca |
| 105361 | aaggactgaa gccatagaga ggttaagtag cttgcccaag gtcgttcggc tactcagggc |
| 105421 | agctgtactg aaaagccctc ctctacMaaa ttcccacaca ctaccgtgcc Rctgaggccg |
| 105481 | cttcctcctg ctccttagcc tcctagcttc actgRcacag ctgaggttga caaccccagg |
| 105541 | cccctcagca gaccagctga tgcacgtatc aggagcaagg cctgacgggg gcaaggcWag |
| 105601 | gcttctgtgt ccatccccgc agtgtcgcaa gagccagaca gtcctgacat ccaggcccag |
| 105661 | tgcacgagtg tagMtacagg ggagctcccg ccaccagccc atgcttggcc tactcagtag |
| 105721 | gggtgggctt tggctaaggc ctccctgtgt ggtctgcctt gggccttcag ccagtgacga |
| 105781 | agaccttgac ccccatggtc tcctgggctg gacttctgat accaccaccc tgtgtgaatc |
| 105841 | tcccagggtg gcggtggaat gagctctacc ttcaagaatc aaagagccca gtcagagagg |
| 105901 | ttgctggcag ctctgcagcc ccagggcggt ggtgacaaga acacagcgag gtttattttt |
| 105961 | aaacctttgt aagtcccaca ctggtcacgt gtatagcacc ctcgcctctc caggtcattc |
| 106021 | tttggtaatg agtagcagtc aactcccaac caaggaaagg gcctgtcggg gtctttgggg |
| 106081 | acagagagga aggggcagca ggtgaggaat aagacctggc agcagcctgg ggtgcagggg |
| 106141 | aaatggggca gcccctgggg cctggcttgg aaaagtggcc atggggactt gatggtggaa |
| 106201 | aggccttgga tactctcaca cacacactca cactctgtgc acacacacac tccatgtaca |
| 106261 | cactcaccgg ggacttcaca gtggaaaggc ctgtacccta ggcctgcaac acacccactc |
| 106321 | agaaaacaca cccacttccc aatcaacacc acctgccaag ctaccacctc tgccacctcc |
| 106381 | tcagcttgtc tctctccaaa acaaattcca cttcctccct ccctcccacc aStctccctc |
| 106441 | cccaccccac ccctgcagcg ctgacagcca gcagccctcc tcccctcgcc ctcattactc |
| 106501 | agagttgacc ccaagaagga tctgtaggtg ctggcagtca ccccgggcac tgacaggcct |
| 106561 | cctgcctgcc cgcactgccg agggtggtca ccctcagctg ccctccccct ccacacccct |
| 106621 | ctgtgaagcc agggacagct tgacatgtag cctgcagccc tgtcacagcc gcctctgagc |
| 106681 | aggtgaaagc aagtcaagca gaatgacgag gcaacagcag actggggaag gggctctggg |
| 106741 | agactaaaaa tacctccatg gggaagggga ggagtcgagc agaactggat gtacgagggc |
| 106801 | ttctggggga gctgccagca ggaaagggag ggtgctgtgg gagccaggtt ttcatctcct |
| 106861 | acagcagggc tgaccagcag agtgactctg tgccacactc gctttgcctc agtttcctca |
| 106921 | attgcaaaat ggggatcgtg tctatagggc acttcagggg acatgcaagg gactcttcct |
| 106981 | gaggcagYag cactcttagg gtctcttaga agatctcagg tttggaaact cagaatccta |
| 107041 | cttggccttc tcaaatgtca cctcctcaga gaagcYctcc ctgaccaact tacatccact |
| 107101 | cacaccctct ccattgtttt ctttcccctc ccatttcatc atggcactga gcgctgtctg |
| 107161 | gcattagatt atacctgtgt tggtttacaa gttgattttg tctcccctac atggagagac |
| 107221 | aaacatggtg gagaccatgt ttattttggc ccccactagt ctcagaacct ggcacagggc |
| 107281 | cagccacata agaagcactt aataaacatt cgccaaatgg atgaatcaat caggcaggca |
| 107341 | gcgagtcagt catctctggt tcttctcctt cattctctgt atccaaatgt tattgcttct |
| 107401 | tcctccaaag gccatctagg ctttgcattt cctttccatt gcacacccta atccaggagc |
| 107461 | tcatcgactg acccctgagc tgttcaaaga acccactaag ggggatctac ctccacattg |
| 107521 | cccccctagt ccaccctaac gggggatcta cctccacact gcccccctag tccatcccaa |
| 107581 | gggactttca gaccattaga caaagggatg aaagacagga gcccatggtc ataggttcac |
| 107641 | gcattcacac gttcattcat tcattgccat ctacaaccca cttacacagc cagtggcaac |
| 107701 | ctagtgctga tcccctcggg ttcaccccat gattgtgctc tcctctgccc atgcacatct |
| 107761 | gatccaggct ttgcccttgc taacctccac tcctccaaga atcttcctct tgccacacta |
| 107821 | aggagtgaaa agagcatccg cttaaagtca gatagacaca ggttgaaaca ccagctatgt |
| 107881 | gtcttgggca agttacttct ctaactttta gttttctcaa ctgtaaaatg agcacaccaa |
| 107941 | cacctatata gcagagctgt tgagagagtt tgagctgaga gtgtgtgaaa Scacagggga |
| 108001 | cagcactaag tccacaggaa gcactcaaca catcatttcc cccctccttg cctaggctga |
| 108061 | tctctctcct ctgaactcct gttgcctttg gttagtgcac agtcaggtgc ctgctgtttc |
| 108121 | taatggtatc atgggtatta gcatcttctt cccagtttga ttcgaaggtc cttgagggca |
| 108181 | aaaatggcat tctatacttt attatgaccc cctaacactt Rgcacatagc gtgcaaagct |
| 108241 | cttttgcata tagtaactca gttaattcct acaataaccc tatgagttag accaagcagt |
| 108301 | gttatgattc ctagctggcc cttgatgaag caggttctca cctgtccaca gtcccagggc |
| 108361 | cagcagaagg agcaggacct aggtctccag gctctgttat agaaagcttK gaaggtgacc |
| 108421 | agccaaagga agccaatcct tcttccccaa gaactgccca ccctacttca ttcctctcta |
| 108481 | ccagtattcc cacactgctg ggccatggca gccatgagtg taccacatgg ccctgtccca |
| 108541 | ctggccacag ttgattggct ggctcgggag tagtcacctg attcaagctg ggccaatcag |
| 108601 | atcctacctc caaggggttt ggaattagaa aacagtgacc ctagctagta taggccactt |
| 108661 | gaactgaggg cccatacatt caggagcctt atggggccat gtacacatgg aagcaggaag |
| 108721 | aatgaaggag ggagaagtag aggccagaaa ccacctgggt tNctgtttcc caatgctaag |
| 108781 | tccctgccat gttcctgctc ttcctgtggt ttggatcttc aaaggttgct caaatttggg |
| 108841 | gcagtggcct ggcagctttt caaatccttc ccatttttat tgaagctgaa agacccttga |
| 108901 | ctaggacaga ctcggtccca agcWgagagc tagatcttct ataccagttg ttctcaaaca |
| 108961 | gtgtggccca ggaatcctgg gggatccctg agtgtccttt cagggactct gcagtgtctg |
| 109021 | aactattttc ataggagtcc taaaacgtga tctgccttgt tcactctcac gctctcacag |
| 109081 | gcatccagtg gagtcttcca gaggcgacat gacacgtgac gatgctgtca ctgtgtgtgt |
| 109141 | attctctagt ttaaaatttg ttttattttt cttgtaaatc ttttttactg ggctacctct |
| 109201 | taaaccacaa taggttcaga gagacaacct ttttaatttc taaaatggca aatatcatta |
| 109261 | gtggtatgaa tattactggt tataacctga ataacagcct ttgggggctc tcagtgtaag |
| 109321 | gaattcctga gatcaaaaaa attgagaacc actgctctac acccttgcta tttttttNtt |
| 109381 | ttttgagacg gagtcactct gtcatgcagg ctggagtgca gtggctcaat ctcggctcac |
| 109441 | tRcaacctcc gcctccgcct cccgggttca agtgattctc cgcctcagcc ccctgagtag |
| 109501 | ctgggattac aggtgcatgc cggcatgccc agctaatttt tcatattttt agtagagacg |
| 109561 | gggtttcaca ctgttagcca ggatggtctc aatctcctga cctcgtgatc cacccgccYt |
| 109621 | ggcctcccaa agtgctggga ttacaggtgt gagccaccgt gccaggcctt tttttttttt |
| 109681 | ttttttgaga tggggtctca ctctgtcact agggctggag tgcagtagca caatcacagc |
| 109741 | tcaatgaagc cttaaccact caggctccag tgatcctccc acctcagcct cccaagtagc |
| 109801 | tgtaaccaga ggtgcacacY gctctgcctg gctaattttt tcagagatga gttctcacca |
| 109861 | tgttgcccgc aggctggtct caaactcctg ggctcaaacc atcctcccac ctcggcttcc |
| 109921 | caaagtgctg ggattacagt tgtgagccac cgcacccagc ctacaccctt gctatttaaa |
| 109981 | gtgtggtcct gacaccagca gctccagcat cacttgggag cttattaaaa aggcaggagc |
| 110041 | tcagccccca ccccatggac ttactgcatc agaatttgta ttttaacaaa atcctcaggt |
| 110101 | gctccatatg cacataaagt ttgagaggca cctgaacacc acagtacata aataaatact |
| 110161 | tcatgattga ttgataattg attaattggt aatactcaca tggatgactc acaagaatct |
| 110221 | catgaatttt aaagagcttt gacttcttgg gctgaagtta ccaaagacac aattattaat |
| 110281 | tgttgggctc ccctcaccac tcagagaata cccattatca aaattccaag agttattccc |
| 110341 | tttgcttgcc ccctcctgat aatatctagg cagtatgaag cactcaaaac ttactgatga |
| 110401 | agaaactgag gcccagggta cttatacaat ttgcccacca tcacagaggt tacataattc |
| 110461 | atccaacgtg tagtaagtgg tagagctgga atttgaactt gcaaggtcta agttcaaata |
| 110521 | aagcagagcY tattctgtaa tccctacctt agccctggcc tcctcagtga gcacacaaag |
| 110581 | cacctggggg cttgtcaaag tgcagactct aattctcatt aatctagtgt ggagtctggg |
| 110641 | cttctgcatt cctaatgagc tcccagatga tattaatgcc accatccaga gaccacacac |
| 110701 | agaggtgtca agacitagac tgcctctagg ttctgacaag acaaatgggc atagttgttc |
| 110761 | tccagtgcca gcagcagctg gaatatacca ctttaaatgg tgggcaatga gctgggtatg |
| 110821 | gtggctcatg cctgtaatcc cagcactttg ggagacccgg acaagaggat cgcttgaggc |
| 110881 | caggagttcc agatcagcct gagcaacaga gtgaggcccc catctctaaa acataataat |
| 110941 | tataaaaaat aaagcWtggg caaaacagct gaactgaggc tgtgagtgca gcagcttcac |
| 111001 | acaccccagc acaggaggct tgcccacagc cttctgggtc cttccatggc tccgtgcatg |
| 111061 | ggtaacatgt ccacagtatc actgtacaac atggaaccat tcagctgctg cttggccagt |
| 111121 | atctggtggg cccagagcca gtctaggctc catccagccc cctcactgtg ttcaggtgtc |
| 111181 | tctcatctcc cctacagctg aaatacgact tttctttctc ttttccatca ttcaatcatt |
| 111241 | cattcgacaa gctaatcatt ggctatatgc tgggccctgg gccaggcatg aactcagagg |
| 111301 | agaaagcaca gacctgtgtt caaatcttag cctcttcctt actaggctga gtgaccttga |
| 111361 | acaaattgct taacccccct gggagcaata gtaccagctt gtggaaatga aagaagttct |
| 111421 | gaccaataga aatacaatgt gagccacact catcatttta aaatttccag cagcacattt |
| 111481 | tttttaaaaa aatagatagg tgcaattaat tttaataata tattttattt aacaatatat |
| 111541 | ccaaaatatg atagttttat aatttaatat aaaaattaag aatgagatgt tctgcattcc |
| 111601 | tttttcatac taagtcttca aaatttcata tttattttat atttacagca catttccatt |
| 111661 | aggactagac acattttgag gactcagtag ccacatgtgg ccagcagctg ccataatgca |
| 111721 | cagtgcagaa atagagatag gagtctaaag cacctggcac aaaggcatca ctctctatgt |
| 111781 | ggtagctctt gttatacaga gcccatcaca ttgcctggtt tacaggaagt acacagtaaa |
| 111841 | tatacatggt tgcactgact gctgatgttt tcacagacac ccaattcata tccactgact |
| 111901 | gcaagctcaa tcttctaaat gtaggttggg gagaggtgtg aagaggacca tttcccacac |
| 111961 | ttgcRtcagt ttggttgggg tgagagaagg aaagSaagtg ggtctggaca tgcacagctc |
| 112021 | tttgggagtt caccaaaggY ccaggaagtc caagctcRaa agtctccttt aataatggaa |
| 112081 | ttcaattttc tttttaatac cctcccctcc gtgaatgggt ctaggccagt ttatcaatgg |
| 112141 | ctgcaaaaat cattaagtaa aaacttgatg aggaactgta taagggagag atcaggctga |
| 112201 | caacactcaa atctactgat caattaaaac accacccaaa gcagaactgg acagggtatg |
| 112261 | cccctgatgt gatacgagaa gaacctatca ccacctagga aggattctta cctccccaca |
| 112321 | agaaatgttt gtacacacat acacaaacac acacacacac aagcacacac cttgaatcta |
| 112381 | agcaagtttc taatcaaact accagttttc aggaaacaca gaggatggag aaagacatta |
| 112441 | aataccaccc tcccaccact tctagaatgt gagaagttcc acaagacaaa caacccaaat |
| 112501 | tcttcaacaa attaatggca tggagaaaaa aaaatgtgtg tggtggggtg caatacagaa |
| 112561 | gagaatacag aagaggtatg ctgtggaatc cSggagactt cagtttcaaa caaaccaact |
| 112621 | ataaaatggc attttttgac aaaaggggaa atgataaggg actagatagt aggtattata |
| 112681 | actattattt tattggatat gataatgata tctgttaaag acacacactg agatatgtgt |
| 112741 | cagttaaatg ataagatgtc tagaacttgt tttcaaatac tccagaaaaa aaatcaaaca |
| 112801 | aacacaaatc aacaaaaagt aggagaaaag aagagacgag dcaagatagc caaaatcttg |
| 112861 | ctaagtgatg aggctggtcc cagctgtacc agaagtgcac catcagagag ctgcccgccc |
| 112921 | agcccctgca caggctgcac agccccacat gcgacaggct ggagcatctc agctcagtgt |
| 112981 | gtgccgcgct ggccgatgtg cagcggccgc ctgggaactt gcttctaata tagtataaag |
| 113041 | cccYgcccca gagctcctaa agcagaattt ctgagtgggg tcctgggaat ctgcattcaa |
| 113101 | taagctctct cagtgatcct aatgtctgct gaggcatgag aaccacaaga gtggagagcc |
| 113161 | ctgccatggt tatcattggc agcaaaccca cagaatgcct gggactaagt gcttatccgt |
| 113221 | gggaggggta agagtcccgc ctagagcctg aaggggtgag atYctcaagc ctgagagtcc |
| 113281 | attttccagg tggacagcag Yagtttactt ctggaggtcc ctctccacct ggttattgtc |
| 113341 | acatgccctt gcagacccca gacggccacc acagaaagcc ccttcgggcg tgaactctag |
| 113401 | attcaacctg aatgcctgga agtgcctgac cagtctcttg tttttattcc ttccacctgg |
| 113461 | gttttttccc ctctgccctt ccccaggctc tggctttttc cttgtcccat ccRaggaccc |
| 113521 | ctgggatggt ctcaagcctc cagagctcat gccaaaccca ctgggagcca ccagctgcag |
| 113581 | ccccctgcta ccccggcaaa cttctttttt tttttatagt catgattatg gtttatttNt |
| 113641 | tttttttatt atactttaag ttttagggta catgtgcaca atgtacgggt tagttacata |
| 113701 | tgcatacatg tgccatgttg gtgtgctgca cctattaact cgtaatttaa tattaggtat |
| 113761 | atctcctaat gctatccctc cccccagccc ctatctcaca acaggcccca gtgtgtgatg |
| 113821 | ttccccttcc tgtgaccatg taccccaaaa gcaggtaccc tgactctgtc attctggcac |
| 113881 | agcaccaggg acaaggcagg aaatgtccag ccttctttag taaccaagca gtggtgacaa |
| 113941 | caggcacatt ctccttatct tccaccctca ccctgatccc acccttcagc cctccccaga |
| 114001 | cctcaccacc cactcagggt accccctctg cctcctctcc tccctcttgc cagctctgaa |
| 114061 | ctcttccagg ctacgacctg ggatcagagc tSttctggag ttttctcctt tgagcgttct |
| 114121 | ccatgtaaga ccatggccat gatttccatc tagctgcagt ggagatcaat cgttggccgg |
| 114181 | gcaccccagc ctccctcatc tctttcctcg ctcatgtcat ccccaactta cccgtcctct |
| 114241 | agtcctgttc tttcgcttgg gaatatcctc ttccaaatcc tcttcttcat tcccttcttc |
| 114301 | tacattttca tcattttcca aaaccctctg aaatgaaaaa aaaaaataga aaaggtgaga |
| 114361 | aacgaaatgc aaagggaaaa accatcagag agtaatttta agggtgttct gatttgttgt |
| 114421 | tattttttaa cMaagtgaag acgctgcctt tgcttgggca gttgggccct ctgaaatgct |
| 114481 | gtctggagtt tgaactcttg gcactaccga ggctctccta agcccttggg ccccttccag |
| 114541 | acaagtcctc ccagaacact gacctttttc cattcttttt gcccaagaag agttttctaa |
| 114601 | caagagacta tgctggtagg ggcccttttc tatgtggggc caWaatgttt acttttgtaa |
| 114661 | atgtaatgtt tctttttgct cccaaagggc cacctcagaa atatgaaaat gtttctcctt |
| 114721 | tccctgccat tctggaaccc tgccctgtct gatgaaagca agtaacttcc tgttcatctg |
| 114781 | accagattta acacgaatgt gctgttcata ataagccact gctttttttt cttttttttt |
| 114841 | tttttaagaa aaatagactt tcatttagta cccgacttgt catggagctt aaagataatg |
| 114901 | aattttaaat tatctctctc cagcagcccg ccagtcacat tgcaacatag aatccaattt |
| 114961 | ccattttgca ggtgaatacR ctgaggctga aaacagtttt gagtgctcca gatcatccag |
| 115021 | tgaagccatg accaaagcaa ggtcaggttc atcggctcag ggttccccat tcatttctca |
| 115081 | gcacagtggc tgagaattcc agatgtaatc tggcatactc tccatgtagg ggcctaagca |
| 115141 | cgtcactccc tttagaggaa ggaaggaggt aggatgtgtt cctctgggct taagggaggg |
| 115201 | ataaaagact gtagcagagg acccagcccc acaatgggag taggaaaaga gggaaggggc |
| 115261 | atggagctca ctgggctcca tgtcaggggg cccagagggg tttttgtttg tNttNttttt |
| 115321 | tttctgagac agggactcac tttattgccc aggctggagt gcagtggcac aatcacRgct |
| 115381 | caatgcagcc tcaacctccc aggcctaagc gatcctccca cctcagcctg ccaagtagct |
| 115441 | gggactgcag gcacatgcca ccatgcctgg ctaatttatt ttttgtagag atgggggtct |
| 115501 | cactatgttg cccgggctga cctcgaacac ctggtctcaa gtgatcctcc caccccagcc |
| 115561 | tcccaaagtg ctaggattac aggcatacca tgcagatgag ctaccacacc tggccacctg |
| 115621 | ggggKttctt tatgggctca ctgtgtgatc tagggcaagt catcatctct tcatccttca |
| 115681 | gtttccccaa ttatacaata ggaattcatt cattccatct acaaacattt atctagtgcY |
| 115741 | gactacRtgg caggctccat gctaggcaag ctgcaaaatg gctacagtcc cagccccaaa |
| 115801 | tggactttcc agtctaggaa agggagaaca gatttaaaca atgtgcatat gtcaccatat |
| 115861 | aattacaact cttctcaaaa cagtggtagS caagttcaaa gtgctatgag agggtgttag |
| 115921 | gagggagttt tccctaatcc aagggccagg ggaggcctac atgagaacat gagctgagaa |
| 115981 | gttgagatgt ggaggatgag caaagactgg ccttgtgaat gaggacagag gggagggagg |
| 116041 | gaaaaggttc taggcagagg aaacagcata agcaaactcc ctgaggcagg gagaggaaca |
| 116101 | cggcttgtcc aaggagcaga aaggccagtg tgaccagtgc ttagtggctc aaggagagat |
| 116161 | ggcataagat ggagctagta aggggaacaa gtaccatact acacagggta accccatctc |
| 116221 | ctcttccttg tggtgatggg tcaaagatca caaatatgtt gagaaggctg agacagtggc |
| 116281 | acacactgca ctgttgtctg ataaccatcg ctgtttaagc cgcctcctgg atgacacctc |
| 116341 | tggcctgtcc tcaaagcagg aagcccgggg tgagccacca ggcagtgatc ttccaccact |
| 116401 | gcccctggct agaatgttct gctctaaatc acagggatca ggacacttct agtcacccaa |
| 116461 | tccatccaaa gaactcaaaa caggtctagt aaattcttct ttgccttttc tactaggttt |
| 116521 | atttgggaat ccaccagctg acagcactta aagggtctct gagccagcct taaccatcta |
| 116581 | acagagaaga agcattgtct gctggacatg acctctggcc cataactagg aaacgtcagc |
| 116641 | ccccattcac agtataagtc tcttgagttc ctgacctgta ggtgggaaca ctagcaaaag |
| 116701 | ccgactgaga cagtgacagg tcaaatgctc tgcagccttt ggggcaaaga catagtataa |
| 116761 | atataaggtc tggttatgac tgttgttgct gttcgtagaa ccatcttgca aactttccag |
| 116821 | gtcttgaagt cacttaatca tggtaagttc caagtgcctc gaatttaaag gtcatagcct |
| 116881 | ctggcatctc agtacaactc cgactctcat ttttcattat aagggtattt attacccgca |
| 116941 | atatggactc tgggttggaa ggtgaaagac tggtagaggc agctgagcta gtccccagag |
| 117001 | tgtcacatgg cctccatatc tgggagtaaa ctgacttctc ttctccctga ggctccatcc |
| 117061 | tccctctgcc catcagcttc cctgtgactc taaagcctct gtctatgccc tgggcctcag |
| 117121 | atgtgatggc ggcagaccca gtgtgtctgc atttcctgcg atgcggccct gacaccagaa |
| 117181 | gcctctcgac ataattcagg aggagccagg agtttctaac aaacaaagct tgtttcagac |
| 117241 | ctcaggaagc ggagggggag tcctgcatca ggagtcgcYg acgggggtgg ggtgtccaac |
| 117301 | tacaaagtca gctgaccccc cagtaacaga catgcattcc ttgtccaagg acattatctg |
| 117361 | gaaaataaac acattttaaa ataacttttc tccctgttac tctaaacagt ctttatggtg |
| 117421 | ataacagcgg tttgtggttg tgtttaaaaa aaaaaaatcc tttttaaaga ctacattatc |
| 117481 | tctggcctgg aatactgcaa aaatctcctg atttccctcc tKccattgct ggccccacat |
| 117541 | ccaatctcct ctccatgcag caggcaacag gatctttatg aaatacaaat tcacggccct |
| 117601 | gatcaaaatc ttccaaatgg cttccttctt tatatcacat ggaaccaaaa gccacttccc |
| 117661 | tgtcctgtgg gaactaggtg gtctggtctc ggcccacctg tcaaactcct gggctctttt |
| 117721 | ttccctggca caatactccg gccacacagg tcttctgttc tctcaacaaa accagctctg |
| 117781 | acctgtcttg gggccatcac acccactgct cctctgccca gaaagctctt ccccaggacc |
| 117841 | atcactttcc tgactcttct catcccatag ggttgaggtt aaatccctca actcgaccag |
| 117901 | atgcggtggc tcacgcctgt aatcccagca ctttgggagg ccgaggcagg cggatcacga |
| 117961 | ggttaggagt tcgagacgag cctggccaat gtggtgaaac cccgtttcta ctaaaaacac |
| 118021 | aaaaaatagt tgggcgtggt ggtgggcacc tgtaatccca gctactcaga aggctgaggc |
| 118081 | aggagaatcg tttgaacctg ggaggtggag gctgcagtca gctgagattg taccattgca |
| 118141 | ctccagcctg ggtgacgagg cgagactcca tctcaaaaaa aaaaaaaaaa tccctcatct |
| 118201 | tcctcaggaa ctctactctg atgctgaatc ttcatactgt ttgttctcat ggattttatc |
| 118261 | ctaaaatgca cttattttat ttgtattcct tgtttcctgc ctgtgtgtca cattcgaata |
| 118321 | tgagtagaga ggataggtat ctcttggtct ctgtgtccct agcacccagc acagtgcctg |
| 118381 | cacagaggaa gccctcatga aactttggtc aaatgaatga atgaatgaaa aagcataatc |
| 118441 | cattcgctac atgtgtattt taataatgca aagtcaataa aaacacgtaa actcatttga |
| 118501 | cttatggtcc tggctttgtc ttctagcaca gtagacagca gacccatgcg ctgcactcag |
| 118561 | cagaccttca gtttacatag gagatgatgg tgacatgatg acgacaatac agcaccagcc |
| 118621 | cagtgctgca tgagaagaac tcaagcccac caccagcttt aaagggaaag ggacccacat |
| 118681 | acccagagca tcaaggctct gggcagtggc tctgccccat Kcattgattc tgtcaaatta |
| 118741 | catgaactaa gcaaaaaaat actctagcaa gtaacacaga gatgacagac cttgacttca |
| 118801 | aaatctgaaa gtcacataca cacacacaag gaagaaagca gtaggtggct taaacaccaa |
| 118861 | aggcaagaag agatccctct ggctggaggg gagatcaaga aaggcttgat ggggaaggtg |
| 118921 | gcactggggt tgagtctaaa agatgagtga gatttgtaca catggagatg gaagaaaagg |
| 118981 | catgccagat aaagggcaca gcgggaccaa tggcatggag ggaagaaggc tgaagaacag |
| 119041 | agcggcgaaa ggagtagtgg aaaataagcc tgaaaactag gttaggaatg gagaggacac |
| 119101 | gcccaggaag gtcacgctca tccttttcga tttatttagt gggaaacaac agttttttag |
| 119161 | cagagttttg ctctagaaca aaaggacagc tagcaaagta ggacatgtca gagacgggaa |
| 119221 | gaactgggga cagggcgatt cctggaatct gttccctcat gtgtccattc aacaaatatt |
| 119281 | tatgttgcac ctggtaagca ccaagcactg tttgggtgct tatgagatat aagcaagcaa |
| 119341 | aactggcaac ggatcctgcc ctcgaggagt ttacattcta ctggaagaaa acagacaata |
| 119401 | aacaataaca taataagtaa gtaaattaga aagtacatta gatgatgata agagtgatgg |
| 119461 | aaaagaacaa gaaaagcaga gtggaatcgg gaggcagggg cagtcagggc aagggtgtga |
| 119521 | gatgaagtac ggcacggtca gggacatctt tgagagaaga ggaaggccag gcaccgtggc |
| 119581 | tcatgcctgt aatcccagca ctttgggagg ccgaagtggg tagatcacct gcagtcagga |
| 119641 | gttcgagacc agcctggcaa acatggtgaa tccgcgtctc tactaaaaat acaaaaatca |
| 119701 | gccagaggtg gtggtgcgca actataatcc cagctactca ggaggctgag acaggagaat |
| 119761 | cacttgaacc cagtaggcag aggttgcagc gagccgagat tgcaccactt cactccagcc |
| 119821 | tgggcgacac agcgagactc tgtctcaaaa ataaataaat tcataaataa taaaaaataa |
| 119881 | aaattaaaaa atgaagaagg tgagggtgag agacaagtgt acatcYgggg aaatggccag |
| 119941 | ggcaaaggcc tgaggtctgg gacaggcctg gcaWgttctg ggaggaacag aaggagattc |
| 120001 | ttgtgcctgg agtggagtgg gtgaggaaaa gaggaagagt ggagtcagag aggggtgaga |
| 120061 | aggccctgaa tttcactctc agatagcagg ggcggtagcg ggttctgagc acagaaatga |
| 120121 | taagaataga cttaaatttt aaaaagctcc ctctcctgtg gtgtatctag acaacagaat |
| 120181 | attattcagc attaaaaaga aatgagctat ctggccatga aaagacatga aggaacctta |
| 120241 | aatgaatgtt actaaatcag agaagccaat ctgaaaaggc Racatactgt gagtccaagt |
| 120301 | atatgacatc ctggaagagg caaaactatg gagacgggga aacggccagt ggttgccagg |
| 120361 | cattaggacg gagggaggga tgaacaggtg gagctcagag gatttttagg gcagtgaaac |
| 120421 | ttctgtatga taccgtaaga gtggacagat gccattacac atttgttcaa acccattgaa |
| 120481 | tgcRcaacgc caagagtgaa ccgtcatgca gactttgaac attgggtgat aatgatgagt |
| 120541 | cagtgcagct catctattat agcaaatgca ccactctagt ggaggatgtt gatcatgggg |
| 120601 | gaggctatac caggggtaca caggaaatct ctgtaccatc ctcttcattt tgctgtgaac |
| 120661 | ctaaaactgc tgttaaaaaa tatttttttt taaagactgc ccctcaagca ctatcaggga |
| 120721 | gaccactgag aagacaaccg cagcagttca cacaaaagat gagagcagct tgggccaggg |
| 120781 | tagcagtggt gggtgcgggg agaggggatg cgggagaact gggcttatgt tgaaggcaca |
| 120841 | gtcgacaagg ctcctgatga gcaggatgtc aggtgtgaga gacaagcagg agtcaaatat |
| 120901 | gaccccaagg tcccttagac aaataaaggt gacagttaat gaggatcttc actagggctg |
| 120961 | cagctcgtgg aaaagagagg agggaacaaa cacaagccat gttgtggcaa ctcaatggaa |
| 121021 | aagatttgac aattcatctt aacacgggaa tggcggagaa gaaggccaaa ttctgtgatt |
| 121081 | cattcaatgc ctttatcgag actcaactct acccagcttg ggaaaggccc cggggacact |
| 121141 | ggtgagcatg accgcattgg ccctggctat cgatggaact taccaagcca accagcaatg |
| 121201 | tattattcca ttattattaa tttaattgta gttttaataa attaatatat aaattaataa |
| 121261 | atttattgaa tattaaatat gcacaatagg tatagcataa aatataaaca tttaatatgt |
| 121321 | aatataaatt taatagaaat acaatttaat tttaataatt taatattaac taccaatgct |
| 121381 | attatttcat aataggatca attcatatta caatactcaa tggcaaacat tgtattagac |
| 121441 | aatgaggatt ccagacaaat aacaaataag agatggtagg tgtgaagtca ggtgcagtga |
| 121501 | ctcacgcctg taatcccagc actctgggag gctgaggcag gcgatcactt gaggtcagga |
| 121561 | gtttgagacc agcctggcca atatggtgaa accccatctc tactaaaaat acaaaaaaca |
| 121621 | gccagatggt ggcacatgcc tgtaatccca gctactcggt aggctgagac acaagaatca |
| 121681 | cttgaacccg ggaggcagag tttgcagtga gccgagatcg agatcatgcc actgcactcc |
| 121741 | agcctgggtg acagagcgag actctgtctc aaaaaaagaa aaagaaaaag aaaaagaaac |
| 121801 | ggtaggtgtg cacccttata atcctattca gtgagagttt tagaagtggc atggatagag |
| 121861 | ggtagtggac ccatggggac agagcagcca tccgcctgaa gggtgaggac ggcatgggct |
| 121921 | tgagggatgg ctgggcactg ctgggaaacg gagtgtgcag tcatggggac cggtgaggct |
| 121981 | gggtgtgagg gtggggggtg ggcaagccgg actcacgtgg ccgtagctgg agcagacgct |
| 122041 | cccacgtttc aagcctagac aatggactct tggttccatg gggacaagga ttcagactgt |
| 122101 | tttgtccact ctgtgtccct gggaccctgc acagtccctg tgttcactag gctcaacaaa |
| 122161 | ttcactttgc atagacagac agaagagagg gaagggaacc gaggtgaagg caataatgac |
| 122221 | tccttcggaa gataggttaa gtcagaaaag aatttgggag cttcctggcc accatagaaa |
| 122281 | caaggcagtc tgagactgag ccccggccct tgaggggagg atctggagcc aagccggtgc |
| 122341 | tggagttctg gaagcgctat ggtgacagga acactctgtg gggtccccag caggtgYggg |
| 122401 | aatacctgta tttcctggat gctttcctcc tccctggcat ccaccttctt ctcaaccccc |
| 122461 | tcgccacgga gcaaggcttc cagcgtggtg ctctctgagg tgaacccatc cttcttcagg |
| 122521 | ggaagctcca cttctgaaaa acaaagatag aaaggcaggt caggccacta gaagcaggca |
| 122581 | gggcaggagg gacagtcctg gaggacacgc agggcccagg gctcctgagg aggactcggg |
| 122641 | gcctgtgctc tctcctcctg gagggagagg aacactggag ccctgtccag cttttccatc |
| 122701 | tccatttcat aatccagaga cagattccga ccatgcccac acccccagag gaagctgagc |
| 122761 | cagagcagaa agggtgcggg gtRgatgtgg gctcacacgg ccatgcttct gcctctccag |
| 122821 | ccatgacatc ggacaaggca ggcgtcagga gcgtggagcc cttattgcat ccacaaagca |
| 122881 | ggggtaacaa tacccaaccc cacaggtggt tttgtaaggg gacatgtgtt catttgcggg |
| 122941 | aaagtgtttc aaaaactcaa gcaatgcaca atgctggcaa ccaagtatgc tcattccctc |
| 123001 | ctatcccagc tcttgtctgt caaccccaYg acctcctcat ggccatgctg gctgcccagc |
| 123061 | tctgctttcc tccatgaaaa gctagttcag cctcagaaag gttgttctct tcaacccagg |
| 123121 | gggaagtgag agcttcaaaa gccacgggaa gaggagcgac ggcgaatgcc tcacaagccc |
| 123181 | cggatgagca gagtggccac tgcacagcca cgccacgacc tttttttctg aaggtatcag |
| 123241 | gagtttgatc agctacctgg ggcttgagaa gagaagccct ggggttgcca gcagagaagt |
| 123301 | ggcaacccga gccagccctg cccagaagag acaccagaga gaagctgaac cccttcctcc |
| 123361 | aggtgtccca aactcctgac ctgacagagg gttggtgtgt ttctttcttt tctttctttc |
| 123421 | cttccctcct ttctttcctt tccctccctc cctcctttct ttctttccat tctctctttc |
| 123481 | tttctttctc tctcccttct ttctttctct ttctttcttt ctctctctct ctctYtcttt |
| 123541 | ctcttttaga gacagggtct tactttatca cccaggctgg agtgcagtgg cactatcata |
| 123601 | gctcactgca gcctcaaact tctggcctca agcaatccat ctgcctcagc ctcccaaagc |
| 123661 | actggggtta taggcatgag ccaccatccc ctgctgtttt tttaattaaa gatgcaaacc |
| 123721 | taaggtacag gagatcattc tgatttacta aaatatttct tcaacctctc ctctgatcct |
| 123781 | ggacctcata cccccacact gccacagttt gatatgtggt ccttaccatt gcaccaggta |
| 123841 | agctgggggc aggaactatg atgcagtggt gtcccagaaa acaggagaga tgaatggcct |
| 123901 | gctcttttgg gggtattgag agtttagtgt agggactatt tacagagatg gggagaggtg |
| 123961 | attaagggat ctgacaaggt aggttaaagc atcccaggtg ggttttgggc aggggtgagg |
| 124021 | gtggagaggg gccattaccg ctgctgctat ttttggaggg acagagggag agtgcttgca |
| 124081 | agaacctgga gatagcacca ttagcaSagc cecaggacag gagctatggc ttgcagaagc |
| 124141 | caggaaccaa gggaagaaac aatccaacca ccctctccat ccatcctcca tcagcctgct |
| 124201 | gcgtcctctc ccaagggcca accttaaaca gaagcgagag gggaagggag cccccttcac |
| 124261 | acagcctacc gagctccgag cagggtgaag acggaaaagc atggatctgg aggggcaaat |
| 124321 | ggaaagagca gcaccaccga gcctgctcca ctgggctctg tcctgactcc aacagaatcc |
| 124381 | tacctgcact ttccacttcc tccaccagaa acagagggag tctgacYaat ccatgaggaa |
| 124441 | gcggcaagcg ggcatccatt aaaactgaac aaatgcacac ctgtgggtga ccggccccca |
| 124501 | gaaaaagaag gtgggaagga gaaacagcat ctaaaatctc ttgagaaaca aagtctttgg |
| 124561 | gatttttcct accaaaaaag gagagcaaag gatccacttc ccatcaagga gcgctaccac |
| 124621 | gaaatcagcc acctctgaat ccatctatcc attcaacaga tatttactga gcacctgcca |
| 124681 | taggaccacc actgtgctgg gactagggac ataggaggtg aaccaaataa agacaggYcc |
| 124741 | tgcctttagg aggcttacag tccaaagaga cagatagtaa atgcaaaata caaaatcaaa |
| 124801 | atgcaattac gaattgtcgt aaatgttagg gaggaaaacg acagaatgaa atgtgaaaga |
| 124861 | atataggtaa cggggtctac cttagatcag ggagtcaggg aaggcctgta tgatgaagtt |
| 124921 | acatttaagg agagtgtcag acaaacagcc aactgtctgc tttaatgagt tcatggagta |
| 124981 | catctccata gcctgctctg atgacatatt actctttctc ccaagtcaga aaagtcttcc |
| 125041 | aaatgtctac tctaaagcaa ttagtgtgtg ctgtctcatg tcctgtcctc agtcaaaaga |
| 125101 | gaacagctgg tcacaacccc tcaaacttat aataatcata tatacataga gttgaagttc |
| 125161 | atattttagt atccccctta gccttcgcag cactaaataa atcctattta ttagtgttat |
| 125221 | ttcccagaat ggtacagcat tttagagcta gaaaagacct tatagatcat ctaattcaat |
| 125281 | catctcattt tgtagatgcg tcacccgaga ccctgaaaag ttaagtaaMc accaacagcc |
| 125341 | acacagcagg atgagaatgc agctgaatga tatttccaag ttgccactga aatcacgaca |
| 125401 | atggccccct ctcattgtat tcttattagt ggttgacagg cttaggctga gccctgaatg |
| 125461 | agctttggta catccgtgta catgcagagg gcttggcaag cagcaaacat tcaaaactta |
| 125521 | gcagctgtta ctgctacgta tcaatcccca ctacacccaa gagcacagtt attaacccgt |
| 125581 | tttacagatg agggcagtgc agcttataga ggttgagaac ttgcttgata tcacacagct |
| 125641 | ggtaaggggc aaagcccggc cttaaactca atctgccttc agacccagtc acctaattag |
| 125701 | gctgcatgga ctccaccctg tctctctgtg gtccttcctt gaaaagtctt tttccaaacc |
| 125761 | tttatgcatt ttcattacat tctgagactc actccRtagt tttcatattt caggataaaa |
| 125821 | ggcagatctt taactgagga tgagggcagg tttgtgccat ggttttgggt tctgctctat |
| 125881 | acgatcatcc ccgtgcaatg ttcaccattc tgcgacagta tctacccact atagaatgtt |
| 125941 | ccatcaatag tgaacttgcc cctctcttcc ttctcctgct cttccttcct cctctgataa |
| 126001 | atatgcctcc atcctgcttt cccataattg aatctactct cttggtcctc tttaaccaaa |
| 126061 | ctttaccaga taggcacagt agaagaatca agagggaaaa cagaaccaaa tgggaaaagt |
| 126121 | gaaatggaaa aagcaagaag ggatctccaa tagcatcaag agtccaatcc cttaaacagg |
| 126181 | aaagtgaagc acagaaagat atagagattc ccccagggtc acagagacat gtagtggcat |
| 126241 | cttgcttccc taattaccac aataRttgat ttgctcccat aggttctgcc ttcagacagc |
| 126301 | cctggagtca atccctagcc ttgccacgta ttagtaaagg gaccatgggc tagctacgta |
| 126361 | acctaagcct ccatttccat atgtggtaaa tgggtgtggt catagtatct atttcagtgt |
| 126421 | tggcgaatca aacatggcaa tgtgctacat aaagaaacgc taaaagaatc cacacacaaa |
| 126481 | aaaactagtg tgataaatag ggtagaagat gaggcttatc aacttttgtt ttattctatt |
| 126541 | caaaacttag attcaaaatt agatcatata cgtaaagaat ctacaacatg gtaagtatcc |
| 126601 | taaaaatgct agatgttatt ccctaagttt gaatagtttt gatttcaatg gtacagctgc |
| 126661 | actgtccaac agaaatgtaa taccggccac ttatgtaatt tttaacttac tagtagtcac |
| 126721 | atgtagaaaa aggaagaaag tcaggtgtca ttaattttaa taagataWtg tatccgatct |
| 126781 | ggtatttcta aaacattacc attcaacatg aaatcaacat aaaaatatgg acgcaaaatt |
| 126841 | ttacattctt ttatctgcat tgtcttcaaa gtctggtggg tattttccat ttagagcgta |
| 126901 | tctcaattca gactagccac atttcaagag ctccatagcc acaggtggct accagctacc |
| 126961 | ataatggaca gtgcagattt gcagcattaa aaataacatt aactatgact ttgcttccaa |
| 127021 | aaaatggaaa gaattttact gtggttctta atgttgtcca cgtaatagct gccgagtgcc |
| 127081 | attccaagag cagagttcta gcggatcact gcaaaccctg gttgcaaagc atgatgggta |
| 127141 | aggcctgcaa ggtcagagtg aaagggtagc catccctccc tacaaacaaa cacagggtgc |
| 127201 | actctgcctc ctgaccacag gaggtcccag aatgaaggag gaagaaaggt aacaggtcca |
| 127261 | agcccttgca caatgtatgt cctaaacaca cttctattga gccctYaggg atttcattta |
| 127321 | tccaatttta tttgaatatg gcccatctgg atataggatt taataattct ttgaaagtgt |
| 127381 | actcattttg aacctcacac aaacttgggg cccacataac ccgacaggag ccattgaacc |
| 127441 | tttaacatta aaagaaaatg gtccaaaaca cacacataat tcatctttaa attagcctga |
| 127501 | ttttatacac atggatataa acccatggat cgttactctc tccRgagcgg cagcagctgt |
| 127561 | cacccaagcc agccgcctcc ctgggccccc gtaagcagct ctgcctctac ttctaattgg |
| 127621 | gaacagagat actccttggg tgacttccag cacgatccat cacaccagag acagcttctg |
| 127681 | tgcaaaccga agcaaatcgg tttctaaata agaaaaaacc tccgagacaa acaaggattg |
| 127741 | aagcatagaa agtcttttaa aaacaaccaa aaaaagcaca aataaaagca aaaaaacaaa |
| 127801 | caaacaaaMa aaaaaaNcca cacacacaca cagaaatttc cagcaaagag caatggcttc |
| 127861 | ttctctttag ggctacagac agggcagcca tcctcttggg tgcagatcaa agccacaagc |
| 127921 | ttttgacaca ggtgccccaa gcctgccacc caatgcactg aaagcaaagc ttccactggg |
| 127981 | ttgttggagc caccgagctc attaacagga tgcaggcgag atgagtctga aagtgcaaca |
| 128041 | tgggagcaca gtgagtaatt aaatcccagg tcatttaaaa atgcaaacgc cacgaatgtc |
| 128101 | atgagctccc caagcctctg actccttctc cttcgttatt tggctcagga tgaaggactg |
| 128161 | gaaacctgca agtcgtatat ggattataat aaaatatgcc atatagaaaa cagattaaga |
| 128221 | cagttcttct ttggggaaat atacaaggag aggagctgtc tgttagctgt cgagtttgca |
| 128281 | agagatacca tctttcggga ggcagtgtgt tctgccaaca gacagactgc cccaagggaa |
| 128341 | attgtggtga aacaccccga caaggcgcat ccatccgtcc atccatcatg ggctccctct |
| 128401 | gatgcagggg cctggagata gagttatggt gcaaaaggga gggagaaatc ccacagacaa |
| 128461 | tggcaaagaa tcctcctgct agatcatgag tgctcaattt tttttttttt tagctgcctc |
| 128521 | tagtttttct tcaaaaatac aaacatgcag ttttctcgtc tgggtgctta ttatattgag |
| 128581 | gagttaagct catcatattt ccttggattt atacatcaaa ttacacgaag gagaaaagag |
| 128641 | cttaagaatc attatttcat ttatccccat cagactgtca gactcgtgag gagggagaag |
| 128701 | ggagggaggt attgttatct ctcacctcac aggggaagag actggggagg gggatcagag |
| 128761 | acctgatttc ctaagatggt ggcaggccca gggatccatc tgctcattcc ctaggggtgc |
| 128821 | cactttcttg gctgcctttg actccctgtt ttgtgactca taaagctcga aatagatgag |
| 128881 | gttcacattg aggacccatc acccaggctg caccctgcag gccctattac cacttgcttt |
| 128941 | agaatctcag gatatccata taacaggagg actcatccct cccccatatg gcctctgctg |
| 129001 | cacctaccct ctcaccccta agtagacacg ccaggatggg ttacggcatc cagatatcag |
| 129061 | gaccacagat aagcattccc ccaccccgag atacagaaaa acacccacac tgcccaagga |
| 129121 | agctcaccac tgagctgcca gcagaccagg taaatgcagc taccaggagg gtgagacggg |
| 129181 | gagggtggtg ggagtggaca gagtgcgggc agcatttcca aaggcaaggt cggggaatca |
| 129241 | ggagaggctg gtcagatggt acagagtgtc agtcagacag gatgaatatg ttctggagat |
| 129301 | ctgttgtaca gcatggtgac tccagttatt agtaatgaaa attgctaaga gagtcaatct |
| 129361 | taaatgttct catgcacaca caaaaaatga caagaatgtg gagtgataga tacattaact |
| 129421 | agcttcattt agtcatttca caatgtatat atatatttaa acatcacact gtatgccata |
| 129481 | aatatatata acttttattt gtcaattatg ccttaataaa gctcggaggg aataaaaaag |
| 129541 | taaataataa aaatgcaggc tgggagcagt ggttcacacc tataatccca atattttggg |
| 129601 | aggcgaggtg ggtggataac ttgaggtcag gagtttgaga ccagcctggc ctacatggtg |
| 129661 | aaatcccatt tctaccaaaa aaacacaaaa attagccatg tgggatcgta cgcacctgta |
| 129721 | gtcccagtga ctcgagaggc tgaggtggga gaatcgcttg aacctggaag Sgggaggttg |
| 129781 | cagtgagcca agatcatgcc actgcgctcc agcctaggtg acagagtgag actctgtctc |
| 129841 | aaaaaaaaaa aaaatgcata gtgcaaagaa atacagacaa ccagaaagtg caaaaagctg |
| 129901 | ctctggggtg aactctcagc tccattaccc taaagcacac acttggcctt gatctcctta |
| 129961 | tctgtaaacc tgggagaaca aaacccactt cccactgttg ttatggggcc aaaggagata |
| 130021 | atacatatga agtgtctggc acaggtgaga tgctcaataa Statgagctc ccttctttcc |
| 130081 | acctcctaca gtttccctct ccttgtgctt ttcagcaaaa aaaccctcac ctttctgaca |
| 130141 | ctctaagacc accagatgtg gtgagtgagg cacagctaac cccaccatgg gcatgagccc |
| 130201 | agggaggatg gaaacaaacg gaatctgagg caggtaacag gatggaagag gccaagaatg |
| 130261 | agacgcagct ggaaagcaga cgctggtgct gctccaagtc cagggtggcc attgctcctg |
| 130321 | gagcttcggg ggRaaaatca tggcagagcc acagtggaag ataccctgct ttatcccttc |
| 130381 | atttggcaag taattatcaa gcacctacta tgtatcgact ctgttctagg tgctggggca |
| 130441 | atgactctga agaaaagaga caaaaatccc ggccctcata gaatttatat tctagcaaga |
| 130501 | gagaaacaat acatgaagca aacaagtgaa accttcagtg tgacagatgg taatcagtgc |
| 130561 | tttggaggaa aaacagagcc aaggaggaga agttggagtg tcagggtgat gggagggggg |
| 130621 | ttacactttt aaatgtggcc aggaaagtgc aagcctgaag gaagagaggg agggggctac |
| 130681 | gctgacatcc aggcaaagac gttccaggca aaggggcctt cagcacaaaa gctctgaagc |
| 130741 | cggcccatct gcctggagca cggtgagcca gggggatggt aggagaccag cttggggagc |
| 130801 | tacaggggca ttgaaggcca tgtaggcacc tgcaagaatg ttggcgtcca ccccaaatgc |
| 130861 | aatggcaagc cgctggaggt gttgagcaaa gcatgatata atgatgccta catgttaaca |
| 130921 | gaatcactct gagaataagt gaagggggtc ggagcagatg tggggtgacc agtgaggagt |
| 130981 | tactgcaaaa tgtatgtcgt ctcttaatga gtttggtgct tggggaggga gctatgcacg |
| 131041 | atatggacag agctctgtcc tcatggtact aatattgtgg ttctcagatg tgtcctgggg |
| 131101 | gcagtaagca ctggggagca gtgccctgag cagggggctt ccccaccagt gaaccaggat |
| 131161 | ggaggccaag tggagaggct ggtgtcaatg caaagtgggc aaaggtgtga agccacacca |
| 131221 | gggtgagtcc acggaggaat ggctcttcaa gaagaaagtg gaccagccca ggccaagggc |
| 131281 | agggaaaaag atctagccac atgggcctgg cctggcatac catggtttaa caggtgtagt |
| 131341 | aaaagcagag aggaggcctt cccagttcat ctctgtgccc tgggccatgg gtgcctcggg |
| 131401 | gctgagttct gggacatagg agtgaggtcc tgcaagctgt ggttctggta aaggtgggtc |
| 131461 | ccacggccaa gttctaggtc atctatagac tggggccttt taaaaggcta taagacagag |
| 131521 | ctgggcatgg tggcgcatgc ctgaattccc agctactcag gaggctgagg caggaggagg |
| 131581 | atcacgtgaa cacaggagtt caaatatagc ctaaggaaca cagcaaggcc cgtctctaaa |
| 131641 | aataaataaa taaataaaat aaaatgaata gactctaagg cagaatgagt tgccattctg |
| 131701 | ggccagatgg cacacacttt tccagcgggg cagYgagctg tctgcagcaa attcattttc |
| 131761 | ggtgttgggg acgggaactg tgttgcRgag acccacccag cagtgcagtg tggaggtaga |
| 131821 | atcacagtgc ctcctcacac ttgccaagtc ctccaccctc catcccacac gcctctcaga |
| 131881 | ataaccccgc aaaatcacca tgacccacat ctcacagatg aaggactgag gcaggagtgg |
| 131941 | ttaggaaatt gtccaaaatc acacagccag tggctggagg gatctagact tgaacctagg |
| 132001 | cctgtgatcc ctgtttggtg cctgtcctcc tgcagagcaa ggatatttgg acagggaagg |
| 132061 | cccctacaac ccaaaaccaa acagccaaga tggcaacact tgggcccccc aggccaggct |
| 132121 | gggaaccaca agggaagcca agctcagcca ccccaggcct ctcctctctg gcggagcctc |
| 132181 | cctcatctgt gaagcagaga tgatgagagc taagtcatgt tctccaaggt taagatcaaa |
| 132241 | caccagacat gtctctttcc ctcatccctt tagaaatctt tactgcccat gtactatgtg |
| 132301 | ccaagcctca tgctgggtgc tagggataca gatgaagaaa cagatgggcc ctcgccgtca |
| 132361 | agttgtccac ctcccagtgg gcagaggtac aggtgagcag gcaatggcat aactgggtga |
| 132421 | tccctcagac tcacaactca tgctctacac gtggctctgc caggtcccac tgcaaaacat |
| 132481 | gaccgtggac actcagcagc agccgtgcca ctgtcctgcc cactgcctgc tgccagccca |
| 132541 | cctcctcggc cagcccaagc tcccagagcc ctgcagaaca ccagcagagc tggggaacac |
| 132601 | gagcagagct gaagtcacac agacttcgtc ccYcagtccc tgctcctttc ctgagacgga |
| 132661 | caggaaggca aaaggagcag gtcccttcca gcacgtaata gccacagcct gagtgggggc |
| 132721 | tgcacgccct gcccacctcg ctccagctcc ccttctcatg aggccaacca gagctgacga |
| 132781 | agctgccggt gcaggcctcc agatggatgg ctgcaggctc tgacactgca ggaaagagat |
| 132841 | aaatgactgg tcatttcccc ctgatgcact tgaaggcatc cattctccca gccgtaccaa |
| 132901 | gctcaggcaa cccccaccgc ccagagacag ataagcactg acagatgggg gtgggagccg |
| 132961 | gagcgtcctt ccccctcgga aggacacagc cagactcctc tgcaggccgg gagaaggtcg |
| 133021 | cgttgtccat tggctcacac ctggctcgag gctccgcggg tcccttcctc catctccccg |
| 133081 | ttcttgccca cccccgcctg gctcatccat ctgaagagca cacggcagag ggggaaggct |
| 133141 | gggggcagaa ggagccgctg acaggctcat caatctcagg ttacatgctt ggcacctcgg |
| 133201 | cgttccttaa gttgttcccg gattgggagg gtgtcgcagg agccaggggc actgtcttga |
| 133261 | ggagaagaga aatcgcaccg aacatcagag agcaaatggt ggagaagcct ggagactatt |
| 133321 | aaaatgtggg ccatgtacaa aagcagtagg gaactaatta agatgcagga ttttcaaaag |
| 133381 | ctggggaagt tggccgcagc ctgctcccat ctgtagagtt ctggcagttc agcgcagcag |
| 133441 | ggacagcacc ctgggtgggt gaagtaggcc tcaccacccc tgctcgagct ggccagactc |
| 133501 | aagtccctcc gcctggacca cccctttggg agatacccct ctgcaggtcc ctacgacttg |
| 133561 | cttgttggcc agcctgtggc cctctctgct ttgggacacc ttaagccact gtcgtcttcg |
| 133621 | gggtgcatgc cctcttgtct gagtttcccc caacgacatg ggatgggggc gatcatcctg |
| 133681 | gtcgttcatc cccagtcatt gaaggactgc caaaaacaga aaaaatacaa gagaaagaac |
| 133741 | actatccctg gctgccctcc ctcccatcac cctcggaatt cggcaagggt ggcaaagagc |
| 133801 | caccctgctc cccaagagtc ctggagcaga agggatcgac aaggcctcag gtgcattcca |
| 133861 | ggtacaggag gagcgtcaac tgtaaagccc ttttcatctg cgggtccagg ataagtgagt |
| 133921 | gtgtcgggcc ttcaagcaac atggcagcag ctccagcagg ctccccatag ggagcatcac |
| 133981 | caggatcctg gcatcaccag gatcccctgg gaaattagct tcctaattct gtgccgcagt |
| 134041 | ttcccaacct ctaaaatgaa gataatatct gtcctagacc atggggaccg aaggtctggg |
| 134101 | gttgaaagat gctaaattga tctaagcaga ctatctgggc atttacttca aggggacaca |
| 134161 | agtaaaagtt tgttcccagc ctttgtcttt tcttcattca aaaaaaaaaa aaaaaggaaa |
| 134221 | agaaaaagaa agaaagtgaa gttaaaggcc tcttttttaa tcagctggct tttgcccaac |
| 134281 | atctgctgtg ctcccaggcc ttctggtgga tatttactct ccacctttct cttctgccag |
| 134341 | ctccactccc ccttcacaag gacagagccc ttttcctggg gagatggtcc gggggaggcc |
| 134401 | ccttgctggc accaggcccc tgcccaagtc tttgtgttgt agaattgtga tgtctacatc |
| 134461 | atgaaacacc ttgcattcgc ctctgtggcc aagtgcaagc tgcagagaac actgaactca |
| 134521 | attgtcagtc actggggaga aataatgttg tgtgtgttgt ccttcagatg cccaggcaag |
| 134581 | taggaggttg caagatgttt attcaagact gactagaggg gtgacatttg gcaggagaaa |
| 134641 | cacataggtc cagggacact gagaacactt gcaaattcca aagagttctt cccagatctc |
| 134701 | aggcccttcc tatccccatg cagacagatt tttattttca gcaaataata aagaaacaga |
| 134761 | agagggatgg tgcatttacc acactgaagg ggtgaggaca gcaggactgg gagtcactcc |
| 134821 | aggagggaat aatttcaccc aggaacaaat gactcgatgt cagccaagac ccagctcccc |
| 134881 | actttttttg agccagggcc tccctctgtc acccaggctg gagggcagtg gtgcaatcat |
| 134941 | ggctcactgc agccacaacc tcgcggactt cattgatcct cctacctcag cctccctagt |
| 135001 | agtgtcaccc tacaggtgcc caccaccaca cctggctaat ttttgtattt tttgtagaga |
| 135061 | caggttcttg ccatgtcacc caggcccagc tccccacttt ccagcctgaa aggtccactc |
| 135121 | atcccacatg agcaaagtgc ttcgggggac tgaatcagaa aaggatggtt ctgtggcact |
| 135181 | gtcctcagat cttctccaac agccctcaag attcttgaac gtgcaccccc cactctttgc |
| 135241 | cctgacctgg tttcctgaca cagctccgca gacctgagSt cagagaaaac tctgaccctc |
| 135301 | gttacccctg gacttcgttg ctgaaacctg cccatcactg ctggactcag gcagggacag |
| 135361 | aaaggaatac aggagggaca agctgaatgt tggcataaat tttttgtgac atctcctcac |
| 135421 | tgtccatagg agagtctgac gtggaaagaa actcatgcct tgagacaatt ctgctccagg |
| 135481 | ccagtggccc ctcagtctct tgaagagcag gcagactatt ctccctcttc ccggaggaga |
| 135541 | tgaggacatg tcagggtgtg ctgacggcag aacccaggtg ggcttcaaca gtactaggca |
| 135601 | aaactagatt cctgagcatc ctctgtcaag gggaggtcac accaggaggc tgggagggaa |
| 135661 | gatgaggaaa agacaggcat cctcaggggg tgggtgtgga ggggcaccWt gggtgggtgg |
| 135721 | gttggttggt tgggttcttt ccaacataac tcagccttcc agtttccata aatttaaaga |
| 135781 | gatgcaaccc aggatggaca aattatcgtt cttcagcaag ttttgcccag aggattatat |
| 135841 | acaatgttgt acaatttgct ttttgttgtg caatttgttt tttttcgcca cttagcaata |
| 135901 | tatctttaac atctctccat atttttttta ctcattcttt taaaggacaa aataatattc |
| 135961 | cattcataga atatacaagt actatatatt taactagtcc tcatcaatgg atcttctgga |
| 136021 | agtttccatt ctttgttgtt attacaaacc atgccacaat aaaaaatata tacccaatat |
| 136081 | atattatatg catatattca tttatagaat aagttcctag caatagaatg tctaggtcaa |
| 136141 | agagcatgtg tgttttaaat actggtaggt actattcatt gtacctcaaa aaggtcatac |
| 136201 | caattccRtt gcaatgtgta aaaaagagcc tctccctcca tctccatctc tgtttccctc |
| 136261 | acctgctccc ctctccttgg gaaggtcagc ctcagtccac ccagctaatg atcctcacct |
| 136321 | cctaggaatt tgcagcaaat tctccagaga ctctggccaa tgactctatc ctgagtcacg |
| 136381 | cgcgaagtat cagccaaaaa actgagctct ccttgagccc aaatcaaatg gaataaaaat |
| 136441 | aagagatagt tattttaaaa tactgtccga gttagccctg ttaaccctcc tgagggagga |
| 136501 | cataccccca aaaaagggag gagtcctctc aagtggaaac tgcattttat gaatgatgag |
| 136561 | ggcagagcct ctggaagttg ggcaggttgt gccctcaaag ggacccccac caggtgcaca |
| 136621 | gaagaggggc tgagatctag ctcgtgctct actaacccac cagaaagggc atcatacgtt |
| 136681 | ttgtaaacgt ccacccccca gggggcacca ccctccactt ttgcacaaac aaaaccatat |
| 136741 | gtgctagtca aggccctgga tgaagtcact cttctgaaat tttggcctgt gcaaaaaatt |
| 136801 | caaatgcaaa cttgcatcac ctctgggaag acagtgggta catttctttg gctgcgctgt |
| 136861 | ttctcattct ctagatgggc cctggctgct tggaggtacc aggctgaggc tcgttaccac |
| 136921 | tgactccagg gcactccgac ggcctcttca ttcaccaccc gcagctgcag gctggcatgg |
| 136981 | tggtacattc tgggagccag gtgcagcccc ggctgttcag actcagaaga ggattgggaa |
| 137041 | atgacaagca tctgccctag ggtttgtggg ggttgtttct gtgtttttag Yaggcctagt |
| 137101 | agtaggtctg tttacccaaa gaggggaaca agttcctctg agaaggtgct ctgccatgtg |
| 137161 | acagtcacgc attccagccc cggctgttca ttgcttctca gcatctgggg gctggtgtgg |
| 137221 | aggaataagc ctgccttggg ggaacccaac ttttcccccg agggcggata attgcaaagg |
| 137281 | ccagcacctg tctctgcaga tggggtcctt ccccgggacc ctgcccatcc ctggggtgga |
| 137341 | ctttcaccac tggaaacctg gtctagccac ttctgcctca tgcttgggca gaggctgaag |
| 137401 | aagcctctca aatgatcaca gatacaagac gccatgtgca ggtggggact tggctatggc |
| 137461 | aaaccgctag ccctaggttc ttcctttccc ttcccctcRc atgttacggc aggcccgaca |
| 137521 | acggggcatg gccaaagcag gctgtgaact cagctgctcc acgttcaccc acaggccagg |
| 137581 | cataaacact ggcaggcccg tgtgcccaaa gtaaatgttt ttaggcagaa ggcacaaaca |
| 137641 | ctcaagaaat agctgcctgc ctcagtccca ccaacatggg ctcctcagat acatgagcag |
| 137701 | cacaRcaaat tcttcttggc tctgtMcaca gtctgatttc tctcacctct aaaatgggct |
| 137761 | cacaaccctc ttacctcttc cttccctctc taccttccag ggctatggta gggaccaagg |
| 137821 | agctgacatg aaagaaaatg ctgcatgaac tacagcatgc tcttcggact ctggttatga |
| 137881 | tgatgatgat taaccagagt gtcccatccc ctgggtggca gcaattggtt gtgggggggt |
| 137941 | aatRacccca gccagctaat ctgtccttcc taggtcttct ctgccacagc tgttgagggt |
| 138001 | gactgccttt ctgctgggtg tggtatgtgc tgagactgga gctgctggca gccccctcac |
| 138061 | ttaccctatg aggagaagag agtgttaaag gtacagagag actggctggg tgtgatggct |
| 138121 | gatccctata atcccagcat tttgggaggc ccgaggcagg aggattgctt gaggMcagga |
| 138181 | gtttgcaacc aggctgggca acatagtgag acccccgtct ctaNaaaaaa aaaaaaaaaa |
| 138241 | atagctaggt gatatggttt ggctctgtgt ccccatccaa atctcatctt gtagctccca |
| 138301 | taattcccac gtgggaggga cccagtggga gatgatcaaa tcatggggga gggtctttcc |
| 138361 | catgctgttc ttatgatagt gaatgggtct cacgagatct gatggtttta aaaacaagaa |
| 138421 | tttctctgca caagctctct ctttgactcc tgccatccat gtaagatgtg gcttgctcct |
| 138481 | ctttgtctcc ccagccatgt ggaactgtaa gtccaataaa ccagtttctt ttgtaaattg |
| 138541 | cccagtctca agtatgtgtt tatcagcagt gtgaaaacag actaatgcag taaattggta |
| 138601 | ccagtagagt ggggcattgc tgaaaagata cccgaaaata tggaagcaac tttgcaactg |
| 138661 | ggtaacaggc agaggttgga aaagtttgga cggctcagaa gaagacagcg aaatgtggga |
| 138721 | aagtttggaa cttcctagag acttgttgaa tgactttgcc ccaaatgctg atagtgatat |
| 138781 | ggacaataaa gtccaggtta gggtggtccc agatggagat gaaaaatttg ttgggaacta |
| 138841 | gagcaaaggt gactcttgtt acattttacc aaagagaatg ggggcatttt gcccctgccc |
| 138901 | tagagatttg tggaatgttg aacttgagag agatgattta gggtatctgg tggaaaaaat |
| 138961 | ttctaagcag caaagcattc aagaagtgac ttgggtgctg ttaaaggcat tcagttttat |
| 139021 | aagggaagca gagcataaca gtttggaaaa tttgcagcct gacaatgaaa tagaaaaaaa |
| 139081 | aaatccattt tctgaggaga aattcaagct ggctacagaa atttgcataa gtaatgagga |
| 139141 | gcccaatatt aatccccaag acaaagggga aaatgtctcc agggcatgtc aagggtcttc |
| 139201 | acggcagccc ctcccatcac aggcctggag gtttaggaga aagaaatggt tgtgtgagcc |
| 139261 | aggctcaggg tccttctgtt atgtgcagcc tagggacttg gtgtcctgtg tcccagctRc |
| 139321 | tccagctgtg gctgaaaggg gccaacatag agctcaggct gtggcttcag agggtgcaag |
| 139381 | cctcaagcct tgacaaattc catgtggtRt tgagcctgtg agtacacaga agtcaagaac |
| 139441 | tgaagtttgg aaacctctgc ctagatttca gaagatgtat ggaaatgcct ggatacccag |
| 139501 | gcagaagttt tctgtagggg tgaggtcctc atggagaacc tctgctaggc agtgtgaaag |
| 139561 | ggaaatgtcg ggtgggagcc cccacacaga gtcccaMctg gggcaccacc tagcggagct |
| 139621 | gtgagaagag ggccaccatc ttccagatcc cagaatggta gatccactga cggcttgcac |
| 139681 | cttgcacctg gaaaagccgc agacactcaa tgccagccca tgaaagcagc caggagaaag |
| 139741 | gctatactct gcaaagccac aggggtggag ttgcccaaga tcatgggaac tcacctcttg |
| 139801 | catcagcatg acctggatat gagacatgga gtcaaaggag atcattttgg agttttaaga |
| 139861 | tttgactgcc atgctggatt ttgaacttgc atggggcctg tagccccttt gttttggcca |
| 139921 | atctctccca cttggaatgg ctgtatttac ccagtgcctg tacccccatt gtatctagga |
| 139981 | agtaactaac ttgcttctga ttttacaggt tcataagcaa aaggacttgc cttgtcttgg |
| 140041 | atgagacttt ggactgtgga cttctgagtt aatgctgaaa cgagttgaga ctttggaaga |
| 140101 | cggttaggaa ggcatgattg gttttgaaat gtgaagatat gagatttggg agggggcaag |
| 140161 | ggcagaatga tatggcttgg ctctgtgtcc ccaggcaaat ctcatcttgt agctccccta |
| 140221 | attcccacgt tgtgggaagg acccggtggg agatgactga atcatggagg tgggtctttc |
| 140281 | ccatgctgtt ctcattctag tgaatgggtc tcacaagatc tgatggtttt aaaaacaaga |
| 140341 | gtttctctac acaagctatt tgcctgctgc catctgggga agttgaggct gcagtgagct |
| 140401 | gtgatcgtgc cactgcagcc agggtgacag agtgagaccc tgtttaaaaa aaaaaaagaa |
| 140461 | aagaaaagaa aaaaaNgtaa gaaagagaga gagaggtaaa gagagacatg tagccctcac |
| 140521 | tacgctcact atgcttgagc acctggatgt agctatgcct gaagccagat aaaccctggg |
| 140581 | atttactggt acatgagcca actttccttt ttctgcttaa gatagtttga cttgagcttc |
| 140641 | caatgtttat gactaaagga attccaacta tctcttggtt attttaataa tttatatatt |
| 140701 | agttttatga tcataaaata aagtttttaa gagaagaagc ctggctaaag tttctttaag |
| 140761 | ttagtatacc tatcaatagt atgaggaagc agaaaaagta ttgaacaRgg aaatcaggca |
| 140821 | acctagattc tctgctggac ccacaaaaat tgctgtatga ctttgaacaa gtttcttaaa |
| 140881 | ctgtctagac tccaataaaa taaagaatca gagttagtga tatctaaggt atcgtatagt |
| 140941 | gctaaaagtc tttgcttcta taaaagaaga cctaattagt ctgatataaa ttgttcttaa |
| 141001 | ccaagacttt ttatagaaat gttaagaata aagactaata atttaaaaca tgtcaagcac |
| 141061 | ttataataaa accctttaaa ttgacaactt acatatgaga cgtcctcata tatacatgca |
| 141121 | aaatattcat tgcatcactc actggttaaa ttggaaaatt tagaaacaaa aattgagaac |
| 141181 | agcccggtta gacaaattca tacaatggaa tattatgtaa ttacaaaaac gaaatgaaga |
| 141241 | aactttatat tttgctgtgg acaatatcta aggcacattt ttaattgaaa agtgcaaaat |
| 141301 | ccaaagtggt tgtgctgtgt aaaaagagga gggaaagtca gatagattta attcctggtg |
| 141361 | caWgcatgga ttatctcttg aaagaatctc aaaaaaaaaa aaaaaaaaaa aaaaaacctg |
| 141421 | ctaccactga ttacctttgg agagactggg tcttattttt catgatacag tatatccttt |
| 141481 | tatcttttga atgtcaaaat atgtgactgc caggcacagt agctcctgcc tgtaatctta |
| 141541 | gcactctggg agaccgaggc aggaggatta tctgaagcca ggagtttaag actagcctgg |
| 141601 | gtagcatagt gagaccctgt ctctacagaa aagacaaaat tagccagaca tggtRgcatg |
| 141661 | cacttgtagt ccccacacac tgaggaggcc aaggtggaag gagtgcttga gctcaggagt |
| 141721 | tggaggctat agtgagctca ttgcaactac tgcacaccag actgggcaac agagcgtgac |
| 141781 | cctaccctct aaacaaaaat taaaaaataa aattaaaaaa actgtacatg taactgtatt |
| 141841 | acctactcaa agtcaaataa attttggaag tttttaattt aaaaattaca taaggctttt |
| 141901 | ttggtactta tggtcatgtc agggtgacat gtagcctagc tacctgtaag tcttcgagac |
| 141961 | cagcatttct cacacttcat cgtgcattct gaggatgcac tccaggggat cgtgataaaa |
| 142021 | tgcaggttct gatgcagcag gtctggagca aggaccaagc ttctgcacgt ctgacaagct |
| 142081 | ccaggtgatg ctgccgctgc aggccaggac cgcactttga atgtaggtct agaaccacac |
| 142141 | tgatcaatac ggtcaccact agccacctgt ggctactgag tgcttgaaat gtggctagtc |
| 142201 | caaaaagaga tgtggggatg tgtaaaatac acaatggaat tgaaaaagag tatcaaaaaa |
| 142261 | gatcataaat gattttatat cgatgacatg ctgaaatgat gtttttgata tgttgggtta |
| 142321 | aatggaatat attattgaaa ttcatttccc ctgtttcttt ttcctttttt taatgtaacc |
| 142381 | actagacaaa gtaaaacaac acacatggct tgcattatat ttctattgca tcatgctgtc |
| 142441 | taggagaacc tgatctccta caacctgcaa caaggcaggg gttgggacaa ccttgtcatc |
| 142501 | accctggagt atttgcaagg gtctgtaaat tggtataagg acactggaga cttgggagag |
| 142561 | agcacattga agaatctggc acccactcac ccctaacaaa taaaacttct atttaagtga |
| 142621 | aatacggatt gaagcgaaca atcaaagcag tcgtaaccct ggaactgtag gtagagcttt |
| 142681 | tgcagagcag agtcagccta agggaccagt gttgMaagga aggagtgagg tacctttgcc |
| 142741 | aggcagccag gcttgacagt ctgcaatgct gtggtgacag tgggaggaag tatgtcaact |
| 142801 | ctacttgcac cactgaacag cactgtccct accaccctga gtcacatccc agcctggcac |
| 142861 | cctcaaaaac aaagatgcgt ttaaagctaa gggcctgggg taatcacttg gcttgctgca |
| 142921 | acacagacac aggtctgaag acagccaaat agtcagaagt gtaatattag atcagcatag |
| 142981 | gccaggcatg gtggctcatg cctataatcc cagcactttg ggaagccaag gcaggcagat |
| 143041 | cgcttgaggc caagagttca agaccggcct ggccaacatg gtgaaacact gtctctacta |
| 143101 | aaaacacaaa aattagctgg gagtggtggt gcacatttgt aatcccagct actcgggaag |
| 143161 | ctgaggcagg agaatcactt ggactcggga ggcagagtct gcagtgagcc gagattgcac |
| 143221 | aactgcactc cagcctgggc aacaaagcta gaYtctgtct caaaaacata tatatattag |
| 143281 | attagtatag acataacgcc accaattcct tctgtgtggc cacagagcaa tctgcatcac |
| 143341 | acgggtaaat tgtaatctca aactcttcca tcctcatcca aggtaagtgc aatttttagt |
| 143401 | gaattggccc ctttttgtgt aagatgctcc aaagctcata cagggtaagg ggtagagggt |
| 143461 | ccacggtgta ttatcttctc cttagaaaca tacaaactgg gccaagattt ctttacttga |
| 143521 | ggccacaaga aaagtatcac atgacccgaa agagctgcac atccttcagt tctgttggga |
| 143581 | aattcatcct gcacctgggc tggggtgcag cctttctttc ctccctgggg tggcaaaggg |
| 143641 | aaggcatgag acacccagag gggagaaaag ctcaggtgga cacgtggtca tgtttctact |
| 143701 | cagcaggcac agaggtgcac ccttaagcat gatgtgggca tgttccctct cccagaaaac |
| 143761 | ttagctctat ggacaaagga gcaaaccaac cttgtcctgg gcccagccca gtcctcccac |
| 143821 | ctttcccatc acagacccag ccaagctcca gagggcactg accaggtttt atctccagca |
| 143881 | gccgcagttt tggatcttca ggtgggtgca Rtcgtctctt cttgcgccag cagcgggcag |
| 143941 | ggtatgtata cagctggccc ggggcaaggc ctgtggacag agacaatata aagattaaag |
| 144001 | gctccaggct ggaaggggcc ttggaaacta ccctgactaa cccYgtcatt cacaaggaga |
| 144061 | ggaagctgaa gcccagagag aagtgacttg tcaacatcac aaagctgatt gctagtggtg |
| 144121 | gcaaggctga atctaggtca tctgacccca ggaccctggc tctgtcagct ccaccatgct |
| 144181 | gttcagcaag cccatgccaa cgagagccat tgccttcacc aaaaccaatt ctgctctcct |
| 144241 | gcctggagag atcaccaact ggaccttcag acaagaagga cctttgcagt gtctccaaag |
| 144301 | cagtggatct ctatccactg cccctctatc ctgatccagg ttaagcaggt tcccttcaaa |
| 144361 | acggagcagc agtcagttgg cctactgtat ggacagcctg ggttgagaag catcgcaaag |
| 144421 | agacagaacc aaaaacacta gatctactca aaggcgtctc ccacccactc ccagctgctg |
| 144481 | gcagctcact gtaggcaaat ggaggcttgt gtagccccca tgagaacata aacccactct |
| 144541 | ggtgaccagg ccacatgacc tgcagagccc gcacacctct atatccccgc ctacatgcct |
| 144601 | gggccttaca aaaaaaaaaa aataggcagg aggccagggg ctgggcttac gtgccaccct |
| 144661 | gtgtgtgtgK cctttgacac caacagcatc actgtcatgc caagcaccat gaggagcctt |
| 144721 | cctgctcacc cgacaacaat tgtgtgtggc tctggtggca gccacgggcc ttagaggaac |
| 144781 | agggacttct ccatgccagg tcacagacta ttcccaggga aatggggcgg ggaagaggct |
| 144841 | gaggggtgag gaggcaggta tttgagactg gctaggtaat tttcagactg gctaggtgat |
| 144901 | ttgtagtcct gaagagagtg tctgataccc cccataataa accagcaagc caacaaatcc |
| 144961 | Ytaataggaa gaaaagccta atgaagacag ggactttttt gtcttgttct tgtcagaagc |
| 145021 | cccagaatca gaactgtgcc tgacacagag cagaaccaaa ctaaatactc attgaattaa |
| 145081 | tgaatgaata tattgcagct tcctttaaaa tcacaactct gtcttctgca ggtaaatgtg |
| 145141 | gcacatggca gctgttggac gcaggcggcc taccacaaaa gtgtcactgt gcacacctag |
| 145201 | gaccatggat tcagaaaaca tcagcacctg attcccatct gccgtcttcc attttagggc |
| 145261 | ccttaaaagt taagaaggga aactggcttc atttttcacc tttgcagaga aaatctatgt |
| 145321 | aactttcatt gctatatact cattcattca ttttcatttt taccagtcaa ctctacccat |
| 145381 | ttattgggat ggggccaaaa caaagtcaat tatcccagca ttaaaggaac caaaatactc |
| 145441 | aggtctcttt atgtttaatc acacagctgc tccacaggtc acaagattgt gaacaagttg |
| 145501 | gaggttctga ccaccccacc cctttggttc ttagaaacta gaactgacct ggactcagaa |
| 145561 | atgtcagaat tgaatgacca ttggccctgc tgttcctggc tccaggggac tcatccaccc |
| 145621 | agatccaaag catccaagag ggactccaga agtggaggcc caggcctgag gccagagccc |
| 145681 | cctgcacccc ctctcccacc atggccatct ctgggcctta ggtttccttc gttccccagt |
| 145741 | ggctgcttta cggtgcttcc aacctaatca aacacaggta agtaagagtg agctggcccc |
| 145801 | caccagcacc ctccaaaggt ctacgtggca agagtgcaaa agtgtccaca cttgtccagg |
| 145861 | tcctacaccc tccctgagac agcagtcact gtgcttggtg gtcagcggta ccagagaagc |
| 145921 | cccaggccac tctgcttgga gctttagacc cattcttctg ggagaattca ttttagcaac |
| 145981 | tagtttgaat ctccagaaga aggggctgtt tttgttccat tctttctctg ctggattgga |
| 146041 | gacactctgc agtgcaaagg aagagcacgt gagtcctggg aagcatccta acacctttct |
| 146101 | gagcctattg cctcacctgt aagataaggg cattgataac attaatacct acctcctggg |
| 146161 | gctgttatgg ggatttgctt atattcaaga gaaagctctc tatatccaca aagatgacaa |
| 146221 | atgtcagttg ttaattgtca tgagttagct gacctagtct tggactccac actcatgcaa |
| 146281 | catgacagac cccctgcccc atccaccatg ctgccacttg gttctttagc catgaaggtg |
| 146341 | gaaacaggct tctttttgat gtctgctttg aatccacctc atcacaacaa gcaaatggtc |
| 146401 | gcaagagctc tcttggagct ccctggcccc ttccttgccc tcctcaacag gctgacaggc |
| 146461 | accagggttc ctttatagga aaaacacgtt cagccctgga gttccactta cagagggaag |
| 146521 | agcagggccc catgagactt atgttgttta tctcagaaca ggaggcagat aactcaaagc |
| 146581 | atgtgtgtgt gtgcatatgt gtgcgtgcat gtScatgtgt ggtagatgga ggtggggaag |
| 146641 | gaggatggag tcacagctgc tgtcagggaa attaaccttg gggagtgagc ctagggctgg |
| 146701 | ggaggggaca tgaaggaggg gaaacaagtg gccaaagaca agaggggaaa ccagtcctcc |
| 146761 | ctggtaacca aggccactgc cacccctcac ttcacatacc ccactgagca aactactttt |
| 146821 | ctgttacttt gagctgcaac tcgagctaca acattcctgc ccatgtgtaa gcacaaatgt |
| 146881 | gatgcacaaa gacacacaca cacaatcaaa aactcacaca cttgctggga gaactggctc |
| 146941 | catggaaata cctggcattg aaaggcttga tgcctttatg gttagcagac tccagacaaa |
| 147001 | tacagctggt tatgcacatt gcacaagttc agcaggtgga tcctgagggt tctgggcatc |
| 147061 | tctcacagac aaagcatgag ctattcagaa tttagaagat gaaatgggag agaaaagaga |
| 147121 | gggaagagtg gccgggtaca gtggctgacg tctgtaatcc cagtactttg ggaagccaag |
| 147181 | gccagcagat cactgaagcc caggagttca agaccagcct ggccaacatg gtgaaacctc |
| 147241 | atctctatca aaaatacaaa aattagccag tatggtggcg catgcctgta atctcagcta |
| 147301 | ttcgggaggc tgaggcagga gaattgcttg aacccaggag gtggaggtta taggagctga |
| 147361 | ggtcatgcca ctgcactcca gcctatatga cagagcaaga ttctgtgaaa gaMagaaaga |
| 147421 | cagaaagaaa gaaagaaaga aagaaagaaa gaaagaaaga aagRaagRaa ggaaggaaRg |
| 147481 | aaggaaaNaa agaaagaaaN gaaaaaaaga aagaaagaaa gaaagaNaga agaNaagaga |
| 147541 | agagaaaggg agagggaaag agggggagag agggaaagag ggggagaagg ggagagaggg |
| 147601 | agagaggaga gaagagggga agaaggggag agagggagag agggacagag ggggagaaag |
| 147661 | ggggagagga aggaaggaag gaaggaaggg aggaagggag agagggaggg agggagggag |
| 147721 | gggagaagaa tgatatggga taggaacagc aattgaaatg gggaagaaaa aaactgaagt |
| 147781 | agtttcatct ttccccatcc agagctgaac tgtggcagtt caagcccccc agggaaaggc |
| 147841 | tctctctctg caggatctca gagaggtgga cccacagctg cccctgaaac ttcctttcaa |
| 147901 | tggagaattt attatgtcac aggacacagt gtcccactgt cggccaactc ttactgtgat |
| 147961 | aaagagattc accatgacct tattttgaat caaaatctat ctccctataa gttataccaa |
| 148021 | tttgtccacc ctctgttcca acagcaaaca gctacatccc aatcctgcat cccatatatc |
| 148081 | tgcttgggtt tgaagggcag ctaaccaaga agccgaggaa ctaaagagga ataagagttg |
| 148141 | taggaaagag ttagtgacta cccctgctca gaaccgggta acaggatcaa agtttccaaa |
| 148201 | tagaaaatga caatacaaca atttaaaata caatttaaaa aaatacaata taatacctat |
| 148261 | ttacatagca tttacattgt attaggtatt ataagcaatc tagaaatgat ttaaggaata |
| 148321 | tgggagaatg tgtgtaggtt atatgcaaat actatgccat tttatataag ggacttgagt |
| 148381 | acccacagat tttggtatct tctggggtcc tagaaccaat tcccagtgga tactaaagga |
| 148441 | tggctgttat gtatataaca tactatcatt tatttaacaa atggggatac acacatattc |
| 148501 | agacaaatat atgtgtgtgg tgtgtttgca tgtttttttt tatgggggta taagccaaaa |
| 148561 | gctaaaaaaa attacctaga gagagagcaa aaataaaata atagtagcaa gaaaaagaga |
| 148621 | aggacgaaga ggaaattgcc tatacgaaaa agaaacaggg taaaagtgaa gatacagtta |
| 148681 | gactttctca taatatacca ttggaacaat gcaaatattt tacacaatta taaagtaaaa |
| 148741 | ttaaattaaa ataaaaagca tacatccgtt tctgactaaa atggagtata aagaccagat |
| 148801 | ttagctccca cctaaaacca aaagagagga agaaaaaaat caacaacagt tttgaagaca |
| 148861 | atgaacatca ggcattgaag gacagtgatc cctgagacac tgaaaacaag caagataagc |
| 148921 | cctgtgattg ccccagctta cagccttaag agagtctcca gactggaaca caaggaggag |
| 148981 | gaatacaggt ggagacctgc agattcccca cgtttgagtt gaagagaaaa tgccaagagt |
| 149041 | ctgaggagac cacagtgact agaacccaag gaactgaagg gtaaacaaaa gagagctgca |
| 149101 | cagagaatgt ggagatccag agggtccctt tcaagtattc agcttagcgt tgatccattt |
| 149161 | atgcctgtga ggaaactaga taggactggg aaaagaacta cccaaaaaga ttagaggtaa |
| 149221 | cagcgctcgg tgtgcacaag ggggcggaaa tagtctgttt ccaccagcca atatggaaaa |
| 149281 | ctgtatgatt cccggggtac tgggtagagt acagtagaaa gatcttgcct cactaatagg |
| 149341 | gaatacttag ccctagacta agtactgctc tggctccacc taacaaatct taaaagcaag |
| 149401 | acaagaaaac atcaaactgt tttcaaataa cttaaatatg tcccaaaaca atgttcaaga |
| 149461 | acatttatag gaataaaata tatctacagc attcagcaag gtaaaattca caatgtgagg |
| 149521 | cacccaaccc aaaattacaa ggcatgtaaa gaagctggaa aatatgactt atMataagga |
| 149581 | gaaaaatcaa tcaattgaaa ccaacccaga actgaaactg atattagaat tagtagcaag |
| 149641 | aacattaaaa cattatttgt atgctctgtg ttcaagttta gtaaaaattt gggagataca |
| 149701 | tatgtatttt taagactcaa atttaacttc tagaaatgaa aactataatg tgcaagatga |
| 149761 | aaatcatatc agagggagtt aatgtcagat tagatattgc agaagaaaag acagataaac |
| 149821 | ttgaaaacac agcaatagaa actattccaa aatgaaaccc acaggaaaaa acagaaaaga |
| 149881 | aaaaaaaata atggcataaa tgagctgtgg ggcaacttca aacagcctaa tatatgtgta |
| 149941 | attgaagaaa gggaagaaaa aatatttgta gaaataatgg ctggaggctg ggtgcagcgg |
| 150001 | ctcatgcctt taatcccaac actttgggag gccaaggtgg aagaatgcca taagcctggg |
| 150061 | agtttgagag cagcctgggc aacatagtaa gatcctgtct ccacaaaaga gagagagaga |
| 150121 | gagagagatg aaagagagac agagagagac agagaaaggg aggaagggag agagggaaga |
| 150181 | aagggaagga aggaaggaag aaagaaagaa tttaaaaaga aataagggct ggaaatttct |
| 150241 | gaaatttgat gaaaactata aacccatagg tctaagcagc tcaataaagc taggtacaat |
| 150301 | aaacattaag aaaactacag caaagtatgt cataatcaaa actgctcaaa aatagtgata |
| 150361 | aagagaaaat attaaaagca accagagaaa ggaaacatgt taacatatac aggaacattc |
| 150421 | ttatctttgc aatgcaagca agaaaagagt ggttcaacat ccctacaata ctgaaaggga |
| 150481 | aaaaaaaact tgtcaaacta gaattctata cccagctaaa atatctttca agaactaagg |
| 150541 | caaactaaag atagtttcag atatacaaaa gctgaaataa ttcatcatca acaaacccac |
| 150601 | actctaagaa atgttaaaaa gaagtacttt aggcagaagg aaagtaatac cagacctaaa |
| 150661 | tttggatcta cacaaaggaa tgaacagcat cagaaatggt ctagtacatg aataattata |
| 150721 | cgagatgttt ttcttattat tttaaactca ttaaaagatg atcaactatt tttaaaaata |
| 150781 | caatgatggc cgggcgcRgt ggctcatacc tgtaatccca acaatttggg aggccaaggc |
| 150841 | aggcacatca cctgaggtcg ggagttcgag aaccgcctga ccgacatgga gaaaccccat |
| 150901 | ctcgactaaa aatacaaaaa ttagccaggc atggtggcgc atgcctgtaa tccatcaaca |
| 150961 | catctactct gactctgaac tcctcctgcc ttccttttat aagaaccctt gtgattacat |
| 151021 | taggcccacc tggataatcc aagattatcg caccatctca aaatccttaa tcctgtcttc |
| 151081 | gaagtccctt ttgccatgta aggtaacata cgcacagatt tcagtaatta aaatgtggat |
| 151141 | gtctgaggtg aggaggggcc ttattctatt aatcacagta ctattgtaga ctccttatac |
| 151201 | tattcatgaa atagaataat ataatttgaa agttaactat aattaaagat gtacactata |
| 151261 | aacactaagc aatcactaaa ataacaacaa aacaagagtt atagttaata aaccaacaaa |
| 151321 | aaagagagaa aacataatca cattaaatgt aaattgccta aataccccta cttaaaaaag |
| 151381 | attgtcagat tacatgtaaa aagcataaca caactatatg ctgcctatta aaaaactact |
| 151441 | tttaatataa agatgcaaat aggcaagaag taaaagaatg gaaaaagata tttcatgtta |
| 151501 | atattaatca aaagagagct ggagtggcta tattggaatt agacaaagga gatttcagat |
| 151561 | aaaataatat taatagagat taagaggatt attttataat gataaaggaa tcaatttatt |
| 151621 | gaggatataa caatactaaa tgtttataca cctaataaca aagcttcaat atacatgaaa |
| 151681 | caaaaagtaa tagaattgta aggagaaata agcaaaccca caattatagt cataagtttc |
| 151741 | aataccctac ctctcaatga ttcatagaat aaatagaaaa taaggatgta gaagatttaa |
| 151801 | aaaacattat caaccaattt gacctaattg atatttatag aacattccaa acaacaacag |
| 151861 | caaaacacaa ttcttttcct gagcaaacag aatatttacc aaggtagacc acatttggtg |
| 151921 | ccataaaaca agttgcaata aatttaaaag aatttgaacc ataaaaatta ttctctgacc |
| 151981 | atttggaatt aacatggaaa taaataatgg gcacaacttt ggaaacgtcc caagtgtttg |
| 152041 | gaaactaaac aatacagttc taaataatcc atgagtaaaa gaagaaacca aacagaaaaa |
| 152101 | tattttgaac tgaatgaaac taaaaaccct atatcaaatt ttttaaatga ggcttacata |
| 152161 | gtatttatgg ggaaattata tcagaaaatg atgtagtaga aaagaaatat cttaaatcaa |
| 152221 | tgacctgttt acaccttaag aaatagataa acctactatg taccataaaa attaaaaaat |
| 152281 | taaaagaaat aagaaacaga agagcaaatt aaatccaaag taaatagaag gaaatataaa |
| 152341 | gatcagagca gaaaaaacaa ttctaccaaa agctatttat ttgaaaagat caataaaatt |
| 152401 | gataaacctc tagtcagaat gatgaggtaa aaaataacat tcaaattaac aatataatga |
| 152461 | gtaaaataat atgccaccac agattctaca tatattaaaa gagtaatgca gcaatattat |
| 152521 | gaacaacttt gtgcaaccaa ttaggagaat gtagataaaa gaaacaaaat cacatactaa |
| 152581 | caaagcttac tcaagatgaa atagataacc taaatagccc tatatctata aaataaatta |
| 152641 | aatttataat taaaaacatt acctcaagga aactgccaga tccaaatgga ttcactggta |
| 152701 | aatgttataa aatatttatg gaagaaataa taccaattct atataaagtt tcagaaaagt |
| 152761 | aaaaatgaag aaatacttcc caactcatta tatgagacca gcatcaccct gacacccaaa |
| 152821 | ccagacagac attacaagaa aactatagac taatatctct cataaacata gatgcaaaaa |
| 152881 | ctctaataaa acttgagcaa catgaatcta acaatacatt aaaaagataa aatagcataa |
| 152941 | caaagtgggg tttatcctag gaatgtaatg ttggtttaac attcagaaat caatcaatgt |
| 153001 | aactcattat gttaaatgta aacttaagat attaaattta atcaaccatt cctacataat |
| 153061 | gaagcttcca tgaacaaaag aaaaaccaca tgatcatctc aatagacaca gaaaatcaga |
| 153121 | tgacaaaatc aaatatccat ttgtgattta aaaaaaaaaa ctctcaaact agaaatagaa |
| 153181 | gggagcatcc tcaatctgat aaagaatatc tacaaaaaat tctacagcta atgtcatact |
| 153241 | taataacaaa aaaataaata aatgctttct ctttaagatc aggaacaaca taagggtgtc |
| 153301 | cagtctcacc acttttacct aatattatgt tggagagtct agccagtgca agagacaaat |
| 153361 | aaaataaata aaagttattc atattaaaag aaagaagtaa gttttcttta tttactattc |
| 153421 | aggttatcta ctagcaaact aacagataat caactatata gaaaatgcta cagaatctat |
| 153481 | agaaagctat tagaactaat gagtttagca aggttgcagg atataggaag aatatactaa |
| 153541 | attaattgtt tttctatata ttagcaaaca tcagaaatta aaatgtataa aaatttattt |
| 153601 | ataatagtat caaaaagtat taagtgctta gagacaaatc tgacaaaaat gttaaagatc |
| 153661 | tatacactaa aaattaaaaa tcattgatga gaaaaattaa agaagatatt aataaattga |
| 153721 | aagatatgcc atattcatgg gttgcaagac tcaatactga aaattgtcaa ttttccccaa |
| 153781 | atggatctat agatgcaaga caatcccaac caaactccta gccagttttt tgtagaaatt |
| 153841 | gacagactga ttataaaatc catatagaag tgcaaaagac ctagaataat caaaataact |
| 153901 | aagaaaatca agaacaaatt tagagggcta acaccacctg atttcaaaca ttataaaact |
| 153961 | ataataatca agacagtgtg gtaagagtat aaagatagac aaataggtca ataaaacaga |
| 154021 | actgagagtc cagaaataaa cacacatata tgtggacatc taatttttga caagccaatt |
| 154081 | aagtggagaa agacgagtct tttcagcaaa ctatgttgaa acaattgaat atccatctgc |
| 154141 | aagaaaataa actaatgcat actttgtaYc atatacaaaa ttaactcaaa atgaatcata |
| 154201 | gacctaaatg tgaaacctaa aattataaaa ttttaggaaa aaaaaataag agaaaccctg |
| 154261 | accttgcatt aggtagtaat ttctcagaca taacatcaaa agcacaattc atgaaagaat |
| 154321 | aaattgataa actggatttc accaaaattg aaaacttctg ctctttgaat gagactgcta |
| 154381 | agttaatgaa aatacaaacc acagattgta aaaaaaaatt tgcaaagcat aggtctgata |
| 154441 | aacttattgt atctagaata tataaagaac aatcaaaatt caataataag caaatagctc |
| 154501 | aattttaaaa tggacaaaag atttgaactt taccaaagaa catatatgga tggtgtaata |
| 154561 | ttgtgatata atgagaaatg tatattttgg tcttaatccc cacttcctgg cacacagttc |
| 154621 | ctaaaacccc tggcatctcc aagtgatgtg tctttttata tgctaatgag atgaccctgg |
| 154681 | ctgggacctg ctggatagcc tctggataag ggattataaa cagcggagcc aaccacaaga |
| 154741 | ttagcaggct gtacctttta gccccaactc taacttccca cctctgacct ccaggaagaa |
| 154801 | aagaggcact agtagttgag ctagtcacta atggccaatg atttaatcaa ccattcctac |
| 154861 | ataatgaagc ttccatgaaa atccaaatgg actagattca gagatctttg ggttgatgaa |
| 154921 | catgtggggg tgctgggagg gtggctcacc tggagaaggc atggaagctt catgtctctt |
| 154981 | ttccccttac cttgccccgt gtacctcttc catttggctg tttcagatac atgtccttcg |
| 155041 | taataaactg gcattYtagt atgcaaacta ttttcctgag ttgttttttt tttttttttt |
| 155101 | tttttttttt tttgaggcgg aatgtcgccc aggctggagt gcagtggcac gaactcggct |
| 155161 | cactgcaagc tccgcctccc gggttcacgc cattctcctg cctcagcctc ctgagtagct |
| 155221 | gggactacag gcgcccacca cgcccagctt attttttttg ttgtattttt tagtagagat |
| 155281 | ggggtttcac cgtgttagcc aggatggtct cgatcttctg acctcatgat ccacccgcct |
| 155341 | cagcctccca aagtgctggg attacaggcg tgagccaccg cgcccggcct gttttcctga |
| 155401 | gttccagcaa atgatcaaac atgaggggca gtcatggaaa cctccattta tagcccatag |
| 155461 | gtcagaagca cagctgacaa cctggacttg aaaYtggcat atgaagttga ggcagtgctg |
| 155521 | tgggctgagc ccttagtctg tggaatctga cgatatctca cagtagatag tgtcaaagtt |
| 155581 | gagttaaact gtggaacacc cagttggtgt ccgcagggaa ttggagaatt gcttggtgta |
| 155641 | ggggaaaaga catccacaca tctgctcaca gaaatattga gtaaaagtat agagaataaa |
| 155701 | acagtttatt ttccctcaca gatggcaaat aagcacatgt gaagatgctc aaaatcatta |
| 155761 | ttaactaggg gaatgcaagt tgaaactgca atgaaatact actatatatc tattagaatg |
| 155821 | gctaaaaaaa ttttcaaact gaccacacca agtgttggca aggatacaaa ggaagtggaa |
| 155881 | ctctcatata ttgctggagt caatgtaaaa tggtacaacc actttggaaa agagcttggc |
| 155941 | agtttcttta atagtgaaac atctatctct cttatgatct agttgttcta ctcctaggta |
| 156001 | gttaacctct caaggagaaa ggaaagcata tgtccattca aaaacttgta cacaaatgtt |
| 156061 | catagtggct tgatttatag tagtcaaaga ctgcaaacaa atccaaatgt ccatcaacag |
| 156121 | gtgaatggat aaattaactg tgatacagcc atgcaatgga ctactactca gcataaaaag |
| 156181 | gaattattga tatagtatta attagtaatt atgctaagtg aaagaagcca gacatgccct |
| 156241 | tgtccctaaa aaagggagta cacaggccgg gtgcggtggc tcacgcctgt aatcccagaa |
| 156301 | ctttgggagg ccgaggcggg tggatcacga ggtcaggaga tcgagaccat cctggctaac |
| 156361 | acggtgaaac cccatctcta ctaaaaatac aaaaataatt agccggggag gctgaggcag |
| 156421 | gagaatggcg tgaacccagg aggcggagct tgcagtgagc agagattgcg ccactgcact |
| 156481 | ccagcctggg caacaaggcg agactccatc tcaaaaaaaa acaaaaggga gtatacagtg |
| 156541 | tgtgtttctg gtatagaaag caaatcaatg gcttctctgg ggagggagta aagaagggta |
| 156601 | gaggcatgga gaagcgcagg aaggatagat ttctaaacac ataggaaacc tttgcgagtc |
| 156661 | atggatatgt tcattatctt gattgtggta atggttccac aggtgaatat atgtcaaaac |
| 156721 | ttatcaagct ggacacatta agtatgtgca atttattgta tgtaattata cttcaataaa |
| 156781 | gctgttaaac ttttttaata acaaggcaat ctcagggact tctgcttctg gaaagatgaa |
| 156841 | atagatacac ttttttatat tcctctcact aagcacaact aaatatcctg gacattattc |
| 156901 | atagaacaga cataagaaat aactgaaaga tgaagggaac cagtcagacc agctagggac |
| 156961 | tttgggacct gagaaacaac agggtgggtg gtgagctccc tgggtattat tttatctatc |
| 157021 | tacctatcta tctagctatc taactatcta gctagctagc tatttattga gacaaagtat |
| 157081 | cactctgtag cctgggctgg agtgcaatgg cgcaatcctg gctcactgca gcctcaaact |
| 157141 | cctgtgcttg agcaatcctc ccacctcagc ctcccaagta gctgggacta caggcacgca |
| 157201 | ccaacacacc tggataattt tttaaatttt tatagagaca aggtctcact atgttgctta |
| 157261 | ggctagtttc gaactcctgg gctcaagcaa tcctcctcct ttggcctccc aaagtgctgg |
| 157321 | gattacaggc atgagcctgt gtccagcccg atcttgggtc tcctttatgc ctcatatatc |
| 157381 | ctggactgga ttctggaaaa gctgataacc cagaaacacc aacaaatgaa gaccaaaaaa |
| 157441 | gacctcaaga aaatcctgct ctctctagcc agagaaccag gaaaggacca gcctagcaag |
| 157501 | acaagcaggc atcccaatag ctttgctggg ttggtgtcag agaaggccaa gggaagagct |
| 157561 | ggtgccttgt ggtatcagta gaggccctcc tcctcccaag taggataata ccagtagagg |
| 157621 | cctagtgggg agcctgaact cccacctcca ctcagcaaca acaaggtgtt cttcccctgt |
| 157681 | taaagaggat gtcaacagaa gccaagtaga gaagatggat ttccacatcc atctgacagt |
| 157741 | aataagggga gcctcRcctc ccctactagc atagcttgaa aggagacctg ctaatataga |
| 157801 | agatttaaat aatatctagc gtctcataaY ataacagcca aaatgtccaa gattcagtca |
| 157861 | aagccactca tcttatgaag aaccaggaaa atctcaaatg aggaaagaca cagacaccaa |
| 157921 | caagaaaata acaaaaatgt tagaattatc tgacaaggat cttaaagcag ccatcattaa |
| 157981 | aagtgtttca acgagcaatt atgaacacat aaaacacatt cagcaaagaa atagaaaata |
| 158041 | tgaagaacca aatagaaatt tgaaaactga aaaaaattgt aacaaaaaat aaaaaagctc |
| 158101 | tcaatggatt ggcttaacag cagaaggcag aggacagaat aaagaagcaa tgaacttgaa |
| 158161 | gagagaacta tagaaatcac ccaagctgag caacagagag aagaatttta aaaataaatg |
| 158221 | aacacagcct cagggactta tgggactata acaaaagatc taacatttgt gttgttgaag |
| 158281 | tccgagaagg agaggggaaa gagggttgaa ctgaagaagt attcaaagaa ataatggctg |
| 158341 | aaaaattccc aaatttggca aaaaaaaaaa aaaaaaaaMc ccataaaccc acaggttgaa |
| 158401 | gaagctgagt aaactcaaac agaataaacc caaaaaatct atggcaaaac acatcaaaat |
| 158461 | cacgtttctg aaactaaaaa caaagaaaaa acttgaaaac aatgagagag aaatgacacc |
| 158521 | ttacttataa gggaaaaaag catttaaatg acagcagatt tctcatcact aaccatcaga |
| 158581 | aagaagtggc aaaacctttt tcaactgcta aaataaaagg actatcaact cagaatttta |
| 158641 | tatccagcaa aaatatcctc caggaatgat ggcaaaatca agacattctc cactgaagga |
| 158701 | aaactaagaa gttgttacca tcagatttac tctaaaagaa tggctaaaga aagtactaca |
| 158761 | tcagaaagta aatgctaaaa gaaggaatct tggaacttca gtaagtaaga aaaacaacga |
| 158821 | aggagtaaaa atatgagtaa atacaataaa cgcttctctt acgttttcta aattatgttt |
| 158881 | gatggttgaa gtaaaaatta taacactggt atggttttca atgtatgtaa aggaaatgct |
| 158941 | taagacaact atattataaa gggaggaggg taaaaggatt taaataatga gtgttgggtg |
| 159001 | gtaatagaat agttttgtat cttgattgta gaagtggtta cacaaatcta gacatgtgat |
| 159061 | aaaatggcat aaagctacat atacacattt taccaatgtc agttttttgg ttttgatatt |
| 159121 | gtaagatgta ttaatcttgg aggaaattgg atgaagaaga taggggatct ctattatatt |
| 159181 | tgcaactgca aattgcaaat acagtcacaa ttgcaattat taattatttc aagataaaag |
| 159241 | ttgatttaat aaagaagaaa ttatatgaat cccctcccca ctcaaaaagc aaaccctgat |
| 159301 | aagtgaaagc aaaatgaaac aaataaatcc aactgtgtat tgagttagtg gcacaatcac |
| 159361 | acagaggaac tatctcagtg accttaaagg agagtaattt ggctgcacat gtttaatgga |
| 159421 | atatacccta aggacaaaaa gacttgcaaa aaaaagaaaa tatcttaaac ctttttcagt |
| 159481 | aatcttattg ttaatagtca tattgtttgt tctgatactg tgtgtgagtg tctgtgtgtg |
| 159541 | tgtgtgtgtg tgtgtgtgtg tgtgtgtgtg taaaataaag caaataagta attacatcaa |
| 159601 | tatcatttct aggatttttt ggtgtaggag aaaggagata cagaattaag atacttaagt |
| 159661 | aaaaactgtt taaatctaaa ttgaatggga tgtatcaaca taatttcata atgtattttc |
| 159721 | tcttaaaaag aaaaagaaaa aaacaaatga atactatttc ttagttctag tcactgataa |
| 159781 | ggcctagaaa caatgaccaa gccaggagca atgaacagca ctgcggtctc taagtaactt |
| 159841 | ttcctacaaa caggagccag gatttcttca agaaatagct gatttCagtc ctggagagga |
| 159901 | ggaagYgtac aggatgagct tgaaatattt catcctaata ttaggatggc Wagaaggcca |
| 159961 | tcagaaacta ctggggttgt ttcaaaacac cagcactggg ccgggcacgg tggcttacgc |
| 160021 | ctgtaatccc agaactttgg gaggccgagg caggcggatc atgaggtcaa gagatcaaga |
| 160081 | caatcctggc caacatggtg aaaccccatc tctgctaaaa atacaaaaat tagcYgggtg |
| 160141 | tggtggcatg tgcctgtagt cccagctact cgggaggctg aggcaggaga atcgcttgaa |
| 160201 | cccgggagRc agaggttgca gtgagccgag atcatgccac tgcactccag cctggctact |
| 160261 | gagtgagact ccatctcaaa aaaaaaaaaa aaaaaaaaca catcagcact ggccagaatc |
| 160321 | ctgaatggcc agagatgagg caagataagc Ytcataagaa taatagctac actggattaa |
| 160381 | aatacatcaa atatgtttaa atctgtgagt tcctggtggt attcaaaaaa ataattatta |
| 160441 | ttatattgat cgtctttgga gaatgctagg gaaccaactc attattttga aaactggtaa |
| 160501 | atagagggga aaaaagtcat ttatcctgcc tttcatatgt gaactgtatc tcacaataac |
| 160561 | taaaatttta atgagggaat gtttttcttt atagaagttg tagagctaac aaatgaagat |
| 160621 | ataatgatag tcctggattg aatattaact ttttgcaacc cttaatggga taaagaatct |
| 160681 | aggcaattat catgaagggc tgctaacatc agtaaaagag gtaaccagac tgtatgagcc |
| 160741 | tcttgatgaa agtacacact accactcagg agttgttctt accaaaaaaa aatggaacct |
| 160801 | gaataaatct ctagacctaa ctaccaattc acagKaataa caccatggga acgcaaccaa |
| 160861 | atccttctgg gaaaccctac agcgtaagca acccagtgtc ttcaacaagt aacatgcaag |
| 160921 | gaggaaagag agagaggcag agacagagag aaacccagag atgttaaaag acacattaac |
| 160981 | cagttgcaat gtagggttcc catttggatc ctgatttaaa ctacaggggg aaaaatgaat |
| 161041 | gttggccaaa tatttgatga tattaaagtc ttattgctaa ttatttgagc tctgatagtg |
| 161101 | attgtgagtK tgtttgtttg tttaagttct ttaccattta gagatacata acaaaatatt |
| 161161 | tacagatgaa atcacgtgct tttgtggatt tgcttcaaaa taaaatgagg tcagggagaa |
| 161221 | aagtaaggag tgcgtataga tgaaacacga ttgaccatga gttgaacatt gttgaagcag |
| 161281 | ggctacatgg ggatgtgttt tactattgtc ttcagtttta tatgaaggtg aaatttttcc |
| 161341 | aaatgWaaca tttttaaaaa catatccagg cagagccaga aaaatcacat tcctgtagct |
| 161401 | gtctccctaa taaaaaggtc tttattctgt tctttgcagc ctagaagact agtgtcactg |
| 161461 | tagctgtagt aataacagta atatcaataa taataggcca ggtgcagtgg ctcacgcctg |
| 161521 | taatcccagc actatgggag gcccaggcag gcagatcatg agatcaggag ttcgagacag |
| 161581 | cctgaccaac atggtgaaac cccgtctcta ctaaaaatac aaaaactagc tgggtgtggt |
| 161641 | ggcgcacgcc tgtaatccca gcgactcagR aggctgaagc atgagaatca cttgaacccg |
| 161701 | ggaggcggtg agtcgagatc gcaccactgc actccagcct gggcaacaca gcaagagtcc |
| 161761 | atctcaaaaa aaaaaaaata acaataataa taataatacc cagcattttg gaagcacata |
| 161821 | cttgctatgt gctaaactca tttaagagtt tttataaatt ttctcattta attcagacga |
| 161881 | aatcttatgt ggtaagtact attattattc acattttaca gatgaggaac ctgagggaca |
| 161941 | gaagtttggt gacaaaggta agcctcacac ccagatctaa tggcagattt ccggcttgta |
| 162001 | accaacaccc aaaggtaaaa gatgaagatt gctgtcatgt cctcagtctt gccttctttg |
| 162061 | ggataaacac ctttagctct ttcactcccc accccacccc acccctgcca catggcttca |
| 162121 | atgccccaca ccatccttgt cacattcctt gaaacacctg ccaggagcca taaaagtagc |
| 162181 | tgagcttctt taaggtatct cagaggccca tgtgcagctt gccccacccc gatcctaccc |
| 162241 | aggctgcctg gtttcccaga caagctgcgg tcctcctccc tccaggctgg gagcctgcac |
| 162301 | atgcgcatgt cccaggagtg gcgcagctca cctgggcctc ggtgcctctt ctccatccag |
| 162361 | atgtagcagt tgttctgggc caccccagtc tgtgagtcca ggaagggaag acgcacgctg |
| 162421 | cgctctgcac acagccgtga gttgtaactc cggcagtgct caatggcttc cttgtagaac |
| 162481 | tggtccccga gcctgccaga gtcagagagt gaaggggtga ggccagggaa gactgaaaca |
| 162541 | cacccagagg gaaacacacc cagagggaaa cacacctccc tggaaagact gaagacctcc |
| 162601 | cagttatgaa gaccaaggca atgagcacca agagccttgc caatgagcag aatgcaactc |
| 162661 | aatgtcaggt cttgactaga ttttattttc tatcccaaat ccaccaggca acttagaaac |
| 162721 | tcctttaaca aagagcatgg gcttccaagg atgaatcacc agtaagagag agctgtccat |
| 162781 | gttctaggaa gcatgaggtc ccactccaga agggaagtag ctctggaaca accttctgca |
| 162841 | tggaatctag aggacatcac acttctagaa cctcctcact catattagct acattttatt |
| 162901 | ctcagaggtc accagcaaag gcactctagg tgaacccaaa tcaccagcaa agatactcag |
| 162961 | ttttccatta caacagaaga gaaacactcc atataaacaa aaactaggac agaaaaaaca |
| 163021 | ttctataaaa gtagggaaat tgcaggaaga agggggtgta gaggaacagg caccaatctt |
| 163081 | ttaaaaccat attacttaaa gaaaaataac tttccgatag aaaacaaaca gaattcaaca |
| 163141 | attttaaatt caaaataatt caactcatgg agtttaaaaa acaaatagaa agacctttct |
| 163201 | ggtttgctag actgagaatc tgattaagca cagtatattt tacgttcctg actctttggt |
| 163261 | atttttggac acgtggtgat gctactaatt ttaaggtagt gtccttttca aagaccaaaa |
| 163321 | atggagcatt gatataattg atcaaatgca aagcactaaa ataatcaatg agatcaaata |
| 163381 | cctaccaaat aaaacatagg cacaggttaa taaatgcctc aaagaaatac aaatgtaata |
| 163441 | acataaStta tgccaggtaa attcaagcct cttactggRg tcggggggca gtggacgcaa |
| 163501 | aggagtggag tgtgggaaga agaagtagga agggaaggag ccacagagtt cacaggggca |
| 163561 | aaagggagaa tcaagtgttt attctgaagc aacattatga tatctttttg ttttggttct |
| 163621 | atgtagattt cagaaagcca aaatgagagg ggaagtctct aaaaatatca tttcttaacc |
| 163681 | aaagtattta gaggaataaa aaaagcaaaa ttggggtgtt gggttttttg ggtttttttt |
| 163741 | tttttttttg agatggagtc tcactccgtc gcccaggctg gagtgcaacg gtgcgatctc |
| 163801 | agctcactgc aacctccacc tcctgggttc aaacgattct cctgcctcag cctcctgagt |
| 163861 | agctgggatt ataggtacct gccaccatgc ccggctaatt ttttatattt ttagtagaga |
| 163921 | cagagtttca ctatattggt caggctggtc tcaaactcct gacctcaggc gatccacccg |
| 163981 | cctcagcctc ccaaagtgct gggattacag gcgtgagcca ccatgcctgg cctcaatttc |
| 164041 | ttaattgtgg taaaatacac ataacataaa atttcccatc ttaagtgtac agtttaagtg |
| 164101 | tacagttcag tggcattaag cacatgcata ctgttgtacg accaccacta ctatccattc |
| 164161 | ccagaactct tttcatcttg caaaactgaa acactatacc cattaaacaa taactccccg |
| 164221 | ttccgcctct gcccccatct ccagcaacta ccaatctgct ttctatctct atgattctga |
| 164281 | ctactccaag tacttcataa aagtggagtc atacagtatt tgtctttttg tgactggctt |
| 164341 | atttgactta gcataatatc ctcagggtta acctatRtta tagcatatgt cagaatttcc |
| 164401 | ttccttttta agtcagaata atattttaag tcagaataat attttttaag tcagaataat |
| 164461 | attccattgt atgcatatac cacattttgc ttatccattc atctgtcagt ggatatctgg |
| 164521 | gttgcttcca cattttagct attctgaata atgctgctat gaacatgagt atacaaatat |
| 164581 | cttttcaaaa ccctgctttc aggctgggcg cagtggctca tgcctgtaat cccagcactt |
| 164641 | tgggaggctg aggtgggtgg atcgcctgag gtcaggagtt cgagaccagc ctggccaaca |
| 164701 | tggtgacacc ccgtctctac taaaaataca aaaattagct gggcctggtg gcagacgcct |
| 164761 | gtaatcccag ctactcaaga gtcgcttgaa ctcagaaggt tgtggtgagt tgggattgtg |
| 164821 | ccactgcact ccagcctggg cgacagggtg agactctgtc taaaaaaaaa aaaaaaaaaa |
| 164881 | aaaaaaaacc tgctttcagt tcttttaggt atatactcag gagtagaatt gctgagtcat |
| 164941 | atggtagctc tagttttcat tttttgagga accaccatac tgtttttcat ggcagctgta |
| 165001 | ccattttcca tttctaccaa cagtgtacaa gggttccaac tactccacat tctcatcacc |
| 165061 | acttgttaga aagcaaagtt ttaaatgcac ttttctatac tctttttaaa aagtcaacgg |
| 165121 | gtcaggttct aacaaagagc ttaaagcaaa tatcttactg tgggaaaaca caaccctgga |
| 165181 | agcttctgag gcatcatttg gaaattactt gttgacaagc atccaaaaaa aaacaaacaa |
| 165241 | caaaacaaaa accctttgct cctttttcac ctctgaacat cttcacattc ataagggagg |
| 165301 | cataatacgc tcagaaagtg tcctggcagt tgcaaaacca aactgtaatc aaattgtaat |
| 165361 | agtcacgcag ctggaaatga attggggagg ggagatgaaa gcccattaca atgctataaa |
| 165421 | actgaatggc acataagctg atgtaatcaa agctggtaac aaggatcatg agattgatca |
| 165481 | aaaataaaga accacttttt acaaagtgtt tgtgtcacac cagcttaaat gcttccttct |
| 165541 | gctatggcga tgtagctcag tggaacagaa ctttcacagg cagcttggcc cagacaagat |
| 165601 | gacccaggct gttcagggta tcctggatgc tccagccccc acccatgaaa cagcaagcag |
| 165661 | ccataccaca tcgatagaga actgacaaga acatttgaca gagaggtgtc caacgtgaga |
| 165721 | gcagcaatct gttttcccag gaccttctga cagactgcca aaaaaaaaag atgttaatta |
| 165781 | tcccaacctc agaaattctg ctgaaaagag aacccataaa atcaggcccc ccaaaaaaac |
| 165841 | aaaatgaaaa attgtatagc aaaactcatc tactggagat gatcactttc aaaataaatt |
| 165901 | tctggaaacc aatacaaaag aaatctacac agtaggattc caaattggac ttgtcctaat |
| 165961 | atgctagtaa ctcacttcca acagcgtcaa tccagacaag aggaacaaga aactgaactt |
| 166021 | gctaaaaatg caaagtgagg ttggccaaca ctggtgctcc acaccaactg gatcgagaat |
| 166081 | gtcaaacaaa gtggcacact gggcgaaaat taatttcatc ttaaatactt tctactttca |
| 166141 | taacatgcaa tgttattagt tacaagcatg ctgggggaaa atgtatattt ctaaatataa |
| 166201 | tctttgtgtg aatgatacct gtcttatgta aacagaaaag actttctgtg gactggaaca |
| 166261 | actgtattaa agatcgaagc tgcaaaaaca tgacattcaa cagcccctct accatcatct |
| 166321 | ccagggaRgt ccttttaaac agaccaggtg ttggcagaga Ytcggaacca aaatttaaag |
| 166381 | cctttttcaa gatataagag gagaaaagag atttcatcct ccctgataaa ttcaagaagc |
| 166441 | acttctccaa aagttaatta gccaaaatcg tcacagggct tgctatgctc tctagaagaa |
| 166501 | aatcaatgac tagttctccc taacccgtag aaagcaattt aaacagcaga ggacaaatgt |
| 166561 | cctttccaac atggtatttc tgccaaaaaa aaaaaaaaaa atcccacaat gatgggatcc |
| 166621 | caggagtgac atttacatta aagttgaagg cgtcagatgg agcagggaaa ggctggcagc |
| 166681 | aaatgactca tctgtggagt ggtgaccagt gtaccctggg ttggatcaca catgggacag |
| 166741 | tcccagccat cacctgcatg caccaaactg agggggctgg atccccaagg gatgattgat |
| 166801 | gtcttaggct agaggaagct ggcacaaggc agggtagaat gatgttctta tcaacaactg |
| 166861 | acttcaggct actcaaggct gcaatcagaa ataggaaagg caagggaaac aaattgctgg |
| 166921 | gctccccagg ctccccagac agcattctgg ttgcagcagt gctggctgcc tagttctagg |
| 166981 | gggctttgtg agtgatggag gtMcttctgt gatcccatct gaattgagaa gccagMccag |
| 167041 | ctctgagagc tgagtgtttc tacatgagat ttccagcaac cctccttgag cctatctgtg |
| 167101 | gagatggact ccagggggcc aaagaagact cagaatggga aagatgagac ttctccaaag |
| 167161 | tgactgccaa ccaggctcca aatgtgattt ttcagagccc atcaatcaca acccctctaa |
| 167221 | gaccctctgc tcctcttcct ccaacctcct gctctcaaga ccacacctgc ttgctccgat |
| 167281 | ttctcagatc actctcaggt ccagccagac acctgggctc ctccctttca ctgtctctct |
| 167341 | ggttctgtgc tctgacctga ggacaggtgt cctgccatac cagaaatgtg agtccaatag |
| 167401 | caagtttctc atcttctgcc agaagcctgc tcccgcccac tcaagtctca atcctcctag |
| 167461 | gggcgggggt gggggtgggg gccgaggcta tgctgccctc cctctcccta gcaacttggc |
| 167521 | cttgactctc cccttgcctt caaaccatct ggaactgagt tatttcattt atcaggaagt |
| 167581 | cgtcctttct ctccactccc cctgtgtggc cccaagtccc ctttgctgtg taaacaggac |
| 167641 | cttggcccat cactactatc tgtgcacaga agcagagata agcagagctg aagagaagcc |
| 167701 | ctggcctgtg gcaggattgt gggggctctc cttcccccag aggcgcctct tcctcactRt |
| 167761 | gggcaccaag ttttcctgct gtctcactca gctgttcaca ccgccagagc cgcccacaaa |
| 167821 | cacacacgRa agctcatcta caccaatatg ctaacttcct gctatttgca tttaaacatg |
| 167881 | tttaactcaa actgttcatg gaaagctccg tctcccattt agtcttttag aataactggc |
| 167941 | acacaggggg caatatctgg caaggtgcgg gaaagttttt attttccttg aagtggtcct |
| 168001 | gttcctaatg catctcttga aagaagacca agtttagtgt ttgttacaga ctgaattgtg |
| 168061 | tcgttcctcc tcacagaaaa aatccacatg ttgaaggcct aaccctcaat gtgatggtgt |
| 168121 | ttggagatgg agcatttggg aggtgatatc atttgatatt tacccctgcc caaatctcat |
| 168181 | gttgaattgt aatccccaac tctgggggtg gggcctagtg ggaggtgttt agatcatgtg |
| 168241 | ggcacatccc tcatggcttg gtgctgtctt cgtgatagca agtgagttct tgcaagatct |
| 168301 | ggtcatttaa aagtgtatgg tgcctccctg ctgactctct ctctcttgct cctgtttttR |
| 168361 | tcatgtgaca tgcctcctcc ccctttgcct tctgccatga ttgtaagttt cctgagggct |
| 168421 | ccccagaagc caagcagatg ccagcactgt gcttcctgta cagcctgcag aacgatgagc |
| 168481 | caattaaacc tgttctttat aaattaccaa atctcaggta tttctttata gcaatacaag |
| 168541 | aatggcctaa tccaggaggt aatcaggtca ggaggatgga gMcctcatga tgggattagg |
| 168601 | gcccatataa ggcagagaca tgagcaagct ctctcactct ctcaatctct gccatgagag |
| 168661 | gacacaaaaa ggcagctgta tgtgagctat aaggaggact cttacctgga atctgaccct |
| 168721 | gctagcaccc tcatcttgaa cttcccagcc tccagaactg tgacagacaa ttatttaagc |
| 168781 | caggggtccc aaacccctgg gccacagagc agtaccagtc catgcctgtt aggaactggg |
| 168841 | tggcacagca ggaggtgagc tgtggggtac aagtgagcat tgctgcctga gctctgcctc |
| 168901 | ctgtcagatc aatggcagca ctagagtctc atagaagcgc aaaccctact gtgaactgca |
| 168961 | catatgaggg atctaggttg cccactcctt atgagaatct aatgcttgat gatctgtcac |
| 169021 | tgtctcccat caaccccaga tgagactgtc tagttgcagg aaaacaagct cagagctccc |
| 169081 | actgattcta cattatagtg agttgtaaaa ttatttcatt acatattaca atgtaataat |
| 169141 | aacagaaata aggtgcacaa taaatgtaat gcacttgaat catcccaaaa ccatcccctc |
| 169201 | cccgacccca gtcggtggaa aaatgatctt ccatgaaacc agtccctggt gccagaaagg |
| 169261 | ttggggactt ccggtttaag ctacccagtc tatgccattt taatacagca gctggacatg |
| 169321 | actgaggaag tgtttctgga tgtttcccaa aaaagggcta aggaggacag gtgagagaga |
| 169381 | ttccaatccc ctttccttcc acattttttc ttcttctaac aaagacaaca ataataacac |
| 169441 | tataatatca atttcaactc aWttcaatgt ttagtatttg tcttctctac tagactataa |
| 169501 | actccatgag ggcagaggcc acatctgcag agccactgca cacagacact caggctgaac |
| 169561 | aactccagca agtaccattc acatcagcgt caatatgaag gccaccccct ggagtggtgg |
| 169621 | agcccagcac tcctgcatac ctgcctggcc ttcttgctga tttacccgca gtgttcagca |
| 169681 | cagagcctgg cacataacag gtgcccagta agtctccatt gaaaagcatt tgacaactca |
| 169741 | cattccactc acctagggca ggcatttaaa ttacagcagg aaggctaatg tggcatgctt |
| 169801 | gtgcacagtc tgcagagtct gtgactggca atttaaactg gatggctgtc cacttgcagc |
| 169861 | ttcagaaaaa cattgagaga atgtctgcat tcactctcct gtagtcctca tcacccagca |
| 169921 | cctgggacat tgcagcactg ggtggcctaa ctgcaagcgc tatagcccta ctcttaccca |
| 169981 | tcctgacaaa aggaattctc cctgaaactc agtgtttagt ctttcaaact cctcagtgta |
| 170041 | gaacccaaga tggctcccaa tggtgcccag gttcctctgc tgggctgggg atgcacccgg |
| 170101 | aaaaactatg tattggggta aagtggaaaa tcaagacttg gaattggtca tgtctgagtc |
| 170161 | cagctccacc tcttaatagc tacacaaccc tcagcaagtt acttaccctc cctgggccta |
| 170221 | aattctacta ctcacaatat gggtaatata atctctactt cagacctgag aaaatttaat |
| 170281 | aagctagaac ctctggcaca cagacataaa agtctgMaat caatagccat tcctttctcc |
| 170341 | ttccccaaag tgcagtactt gctgccactt tgtggcatga ccctctgcct gagcaggctg |
| 170401 | atacccacca tgtgatgcaa cactcactat tgcggtgtcc ttgaggctgt cggggaccca |
| 170461 | ctcaaacctc tgtcccagga cagaaggcct ctgggtcacc aaggctgagc ctcaggcatc |
| 170521 | caggagagca gggcagctga tgcatggtga ccccagcaat ccacccaagg actgccctaa |
| 170581 | gcacagagac cacatctggc ttgtttactg ctctctccca aagcctagta catgctgggt |
| 170641 | catgcctgcc acattgggta aatgatgaRt gaatgagtga atgaatgaat cctcctctga |
| 170701 | cccccctgca tatatgaaac agacagccct acccctgaat ctcaacaaaa cactttactt |
| 170761 | atatccttcc tcccacctgg aatttttgta ttctgtcctt gtcctggctg atcttagcct |
| 170821 | agtcaagagc tggctgaaaa cttgcttctt ccaggaaggt tcacaggtta tctctaccag |
| 170881 | tagggtttgc tctctggctt ctctgagcta ccttatctgt cttactttat ttttgatggt |
| 170941 | ctttgccacc ttccttatct ctgctcactt aattagattg gaagtatctt aaagacagga |
| 171001 | actgagagct atgtgcttgc atgctaccca accatgcaca gtactgggaa tgtagaagca |
| 171061 | tgtgatagat acattgcttg actgaactat catgtcatcc tcagcaaact aatgaaagct |
| 171121 | tcacagttga gaggtgcttg gaacgttcta actttctcca tgggaacatg aggtgagcct |
| 171181 | gaagttatct ggctacttct ccagagccca ggattaggca tctgaaaata gatatcctcc |
| 171241 | aagttcaaat cctattgagt tttttcccat atccttaaaa aaaggtcact tcagYtcctg |
| 171301 | agattttcat ttctccatgt gcaaattcat gctaccctgc aaggtgccac agaactgaca |
| 171361 | ttctccttct ctgaacttta caagaagctc actgNttctc aatgctgctg acatcagacc |
| 171421 | tatgccagga Raaccagctc cttctctgca tgggtagaaa tgcccttctt gtgcttagtg |
| 171481 | agaatgccat caccacatgc tccaaaagaa tgctctcaaa ctcaggattg tgaaagaatc |
| 171541 | gctaaggggt gggaagctgt gcaattctga ttctagaggc ttgggatgtg atccagacat |
| 171601 | cagctcccca gtgatcctga gaaatWtgag actagctgat ctaaagatag ctccccaacc |
| 171661 | tctaaaacaa gggcatgaat gagaggggac ttgtgttgct cctcagccac catgtttgaa |
| 171721 | tggcagagct ggacRgccca gttagcagac tttgtttcat tcagctggtt ttgtttctgt |
| 171781 | gggaaaactt ctttcaggca gctggcatgg attaccctgg cagcactaac ctgcagcaga |
| 171841 | ctaatcccac aaaagtcctc atccctaaca aaattgccaa aagccctggt caaggcaaat |
| 171901 | gtatgaagat ctgacatcct tagtcattct gtgggtggct ctgaccttca aaacatctca |
| 171961 | ggaagggcac aYtggggaca aaggtatccc ttgggaaagt tatgtccgac aaacagcttg |
| 172021 | aaccctaaaa catccatcat gacttcgatg tggctcagtc tgatgttcag gcccagtaga |
| 172081 | cccaataaat cccttttcca gcatctaccc tggtgaagac ttttcaggga cttattatgc |
| 172141 | aaagctgcct aagcaagaca gaatttatat tgaacctggc catgatttct gagccgccac |
| 172201 | tgggtgttct gatgacatac acatctcgag gttgaagtca aggagctgcc aaggacaWga |
| 172261 | gactggtggc aggataaaag cagtgtgatt ccttccagta aataatggtg gggtggcggg |
| 172321 | ggaggtggga aggggacgct ccggggagga agaggaccgt agcttttctt gtacccaagg |
| 172381 | tttgcctttc aaatggcatc cagacgtgac caaataaatc tctcctctgg aggctaaaga |
| 172441 | atgtgtaSaa tgcaacaaaa gtgaggtggt ggagaagcct gctttatcta gggtgaatca |
| 172501 | tacctagaaa gaaaacatgc atccgtcaca gaaatttcat tgattgagaa aatattttta |
| 172561 | gtttcctggt ccacagactg agtccttcct gaaactctca ctatgagctg ggcactcgga |
| 172621 | tgttgcctcc tgagtgtgat cgcctataga agcagactat tgattagaga aaattcttag |
| 172681 | acaaacagat ccccagccct catctttgcc actggaatgc aaagggtgct gccctcccca |
| 172741 | gtaaagggaa tatcggtctg gtatttaaca cggccacaaa gaacatgttg ttctatagtc |
| 172801 | aattctctat acagcagccc aagtgatttt tttttttttt tttgaaacaa ggttttgctc |
| 172861 | tgttgcccag gctggattgc agtggtgcag tggaggagtg tagcctccac ctcccagMtt |
| 172921 | caagcaatcc tcccacctca gcctccagag tagctgggac tacagacaca cgccaccaca |
| 172981 | cttggctaat ttttgtattt ttttatagag gcagggtttt gccatgttgc ccagcctggt |
| 173041 | ctggaactcc ggggctcaag cagtcagccc gtctcagtct cccaaagacc tgggattaca |
| 173101 | ggtgtgatcc actataacca gccccagtga tcttttaaaa acagaaatca gggctgggca |
| 173161 | cggtggccca cgcctgtaat cccagcactt tgggaggctg aggtgggtgg gtcacgaggt |
| 173221 | caggagttcg agatcagcct ggccaacaca gtgaaatccc gtctctacta aaaatacaaa |
| 173281 | aattagccag gtgtaatggc ggacacctgc agtcccagct acatgggagg ctgaggcggg |
| 173341 | agaatcactt gaacctggaa gacagaggtt gcagtgagcc gagattgcac cactgcactc |
| 173401 | cagcctgggc gacaRagcga gactccatct caaagaaaaa aaaaaagtgg aaatcaggcc |
| 173461 | atggcaKtct ctcctactaa cacctccaat gtcttctcac tgcactcaga gcaaaatcca |
| 173521 | aactccttcc catggctaca ggtccccagg ctggctgggc tcacctttcc tgcttcatcc |
| 173581 | tgtcccctgc ctccttcccc gctgggctcc atcctcactg cactcctttc tgttcctctt |
| 173641 | ctatactaag ggtatctcac ctcaggacct ttgcatatgc catctcctct acctggYatg |
| 173701 | acatgcttct cccagatctt cttgtagctg actgctcctc tgagatgtct tcttaggttc |
| 173761 | accctatctg gaagtagccc accccacccc aaccctgccc taccctttgc tatctcatat |
| 173821 | actttatttt tttcataaca ccactatcaa agtttttctc tttgcctact gatcatctat |
| 173881 | acacaactaa attgcaagtg ccacgagagc agcgtccttg tctcatcaga ttcccagccc |
| 173941 | ccaacgcaag acttggcaca taggaaatgc tcgacacata tcactcaaca Raaaaatgaa |
| 174001 | agctctaggc ccacctgcaa ctgacagctt gaatgatacc gaatcctggc cttgtagaag |
| 174061 | gctggaagtc agtgctggca ggagaccccc Wgcacaggga ataagaatca cacagctgcc |
| 174121 | accacctgat tcctggccct ttctgcccaa cacaacataa atgacagcag gtcagtggca |
| 174181 | cagtccacag tccacactca aatcttgatc atggccaccc acatacccca aacctggaga |
| 174241 | gagactgggg tgaggtagat aaacgatgcc attcaagaca tcagacattg ctttciatgc |
| 174301 | ccaaaaggca cattccaggc ctgatattgg caccggaaac tagcagtgcc agaagatggt |
| 174361 | ctccaacata cccatcccat gtccctcaaa gggcctctct ctggactaac ctcttctgca |
| 174421 | tggtctttcc tgcagagctg atccgtgtcc tcctgcagag ccctgggccc acgggtggtg |
| 174481 | ccaggggcag cggcaggatg ggggtggggc tgcttgacag gaaatcaatg ggaactgaag |
| 174541 | gtcatccgga gggcgcagtc tccccatcac Kcacctgctg gcatgggatt tgtggtcctg |
| 174601 | acctcgcttg ggggcctctg ccctcctgtc agagttggtt aaaatcagcc tgcagaagca |
| 174661 | aatgtcctgc acaccaaatg atctccaggc agcccttcta agggacatcc agccaaacaa |
| 174721 | agaagcactg agtctcattt cacccgccgc aaagttgaga gtcaccccaa tctctcttgg |
| 174781 | cagcctccta ggaaaactgt ctcagacctg ccatttttgg aggcacatac ttgtaaatag |
| 174841 | aacaaagcca gactgaccaa gaggctggtt atgtccccaa acttaagttg cctggtggtg |
| 174901 | gaggaagtaa aaatacactg ggaaccaaga tgactgaaac tgaaatcttg agtgcaccct |
| 174961 | agaaatgcct aaatctgccc tcaacacctc tacatgccag gataacgaca aaggatacca |
| 175021 | aaacctctgt actgccggag ggaaatctca ttttcttctc atcccaaaaa atactgggga |
| 175081 | gcttggctga atctagaatc tgattttcct tcccccacta tacttatttt cccaggttcc |
| 175141 | cattctccct tgcttcccag acctttcccc tctaccatct tctttcccaa ttcgtccacc |
| 175201 | tcatcaagag tcatttatca tacaggccag gagcaaagcg gtcagcctaa gtctccaatt |
| 175261 | caaaagttga aaatgggcca ggcacagggg ctcacgcctg taatcctaac actttgggag |
| 175321 | gccaaggtgg gaagactgct tgagaccagg agttcaagca ccctggccaa cttggtgaaa |
| 175381 | aaccgtctct actaaaacta caaaaattag ccaggcttgg tagcaggtgc ctgtagttcc |
| 175441 | agctacttag gaggctgagg caggagaatg gcttgaaccc agaaggcgga ggttgcagtg |
| 175501 | agctgagatc gcaccattac actccagcct gggcaacaag agcaaaacac cgcctcaaaa |
| 175561 | aaaaaaaagt tgaaaatgaa tatggtatga aaataaagaa aaggccaggc acagcagctc |
| 175621 | atgcctggaa tcccagcact ttgggaggcc aaggcaggag aatcacttga ggccaggagt |
| 175681 | tgaataccag cctgggcaac atagtgagat ccccgtctct acaaaaaaat aaaaaataaa |
| 175741 | aaaatgtttt aatgaagaag agacaccctg gacatattta cagaaggata acaggatgct |
| 175801 | ggttatagta gcaatagtgg catagctaat atttattgag catttactat gtgtgccagg |
| 175861 | cactgttcta agcactttac atgtattatc cccatacaac ttgtaattgt attattccca |
| 175921 | tacaactcca tgattttata cccaccccct cacacacccc actttacaga ttggcaaact |
| 175981 | gaggcacaga gagtcttacg tgatttgcta aggatctatg tggccttgtt aatacattac |
| 176041 | agtcttgcca gaaccttact cttggccact gcactgtcag cctcttacaa gggcgccatt |
| 176101 | accccctcac aatgagtttt gcctccagaa ctagaataac ctgaacactt cctttcttgg |
| 176161 | aggcactaga acacttcctt tcttggaggt ttctatcagc atcaccaact tgctagctaa |
| 176221 | tcttagctat ttcttttctt tgtgcctcag tatcccaaac tgccaaatag cccagaaata |
| 176281 | aaccttctta tcacagagcc acctctcagt aactcaaaaa aagttaatat ggggcttcct |
| 176341 | gaaaatatgc catcagagaa atacaaaatg tcattatgca gtttagaaac caaatccatc |
| 176401 | ccaaatgtga gcaaggggcg atggacttga agaggccctg tggttctgaa catcaactaa |
| 176461 | ggcagaaaaa gagaaatgcc agaaagtcat aaactaaagg gtcagattaa agaatcccag |
| 176521 | aatgttagac actgtctagt ctggtgcctg gttttattgc aaaggaaatc aataaccagg |
| 176581 | ccaggtgcag tggctcacgc ctgtaatgcc aacattttgg gaagccgagg cgggtggatc |
| 176641 | acctgaggtc aggagttcga gactagcctg gccaacttgg tgaaactcca tttctactaa |
| 176701 | aaatacaaaa aattagccag gcatggtggt gcatgcctgt agtcccagct actcaggagg |
| 176761 | ctgaggcagg agaatcgctt aaacccggga agcggaggtt gcagtgagcc gagattgtgc |
| 176821 | cattgcactc caacctgggc aacagagcga gactccacct aaaaaaaaaa aagaaaaaga |
| 176881 | aaatcaataa ccacagaggt gaggtgacgt cctcgggaca taccgaggca gagctgggat |
| 176941 | cagatcctca gtccagactc ctagttcagg gattcctcca tcgtttatgg caagggtcaa |
| 177001 | caaactacag cccctcggcc aaacatagcc caggactaat ttttgtaaat aaagttttat |
| 177061 | gggaggcaag ccatgcccat ccgtttacat attgtctgtg gcagcttttg tgctgaaatg |
| 177121 | acagagtcga gtagttccaa cagagaccat gtggcctgca aagcctaaaa tatttaccat |
| 177181 | ctggaccttt acagaaaaag tttgccgact cctggttttt aacataagcc ttgaataatg |
| 177241 | aaaagcctcc accctcagaa tacaaaataa tagaatagga aacctaagag tcacacagct |
| 177301 | taagcagata gttttacaat tatctcagct tggtacaacc taataaaaac ccataaatac |
| 177361 | agttaataat aaggaaaaca agcactagct caccctacct atttaataat tattgttaac |
| 177421 | tacagcaagc aaaactcata gctgaaaatt cgtttgtttg cttttttcta gcctcccttg |
| 177481 | aaagccctgt ttcatctagg aaatgctgtt ggccaatggg cgaaaggaca catcctagag |
| 177541 | gcgcacagcc ctaatttcct cctgttgagt tgcaggctgc tgctgaggca gctgaagact |
| 177601 | tgagagcatt gccctctctc cagagcggac tcagagagag ttgattttct ctgtcaaagg |
| 177661 | cgatggcgcc aaaaccctcc tgtgcccctc actccagata gaaccctcag gaacagccag |
| 177721 | gcatggaaga gactgtcttt atggcttcct ctccctactg ggcctccatg ccctgcttaY |
| 177781 | acccctttcc tccccagaaa gtgatcagga tatgcacacg gcccacagaa gcccagccca |
| 177841 | cagctatgcc atcattctat catcccatgg aatagggaaa agcgggtctg cccctgttag |
| 177901 | gctgatgtgg gaatcaagag acctggattc cagattggag ttggaactta gtcactttgg |
| 177961 | gtttttggca aatctctcaa gccctctggg cccaggtctc ccacgtcaaa tggagagatc |
| 178021 | gtcttcacat attccaaatg atggaacacg ggcagagcca aattaagggg tggggcaggc |
| 178081 | caaccacgtg gcacccgggc tccagtctct aatcacacta agtcattaSc aggaacatag |
| 178141 | aaaggtttac tagtgtcact caggcagaga actttgagaa ataggacctg gctttcatgg |
| 178201 | aatagtccag ttcgcatcaa ggtcccactg taatgattat tacacttttc cctctcaaaa |
| 178261 | gcgcccttgc ttggctgata aatgataaag tcaccctact aataagctgt ttgtggtggg |
| 178321 | agtgaggtga gacacgtggc ccaaggcacg gacagtaatg gcaatacatg ggcttctaag |
| 178381 | gaagacaagt tcagtttggt caagaggtgg ggtgcaggtc cggggccaga actgagctgc |
| 178441 | taaggacaag agaggagagg ctgcctctgg tggcccggct tctccatttg ccatgcacac |
| 178501 | agcctttgcc tcttctttta tttgtcaaat atttagagaa tattcgccaa agtgtgagct |
| 178561 | ccccaggagg cccacaggtg ctggagagaa gagagggctt tggagagtac tgtaaggtga |
| 178621 | aagaaaccta ccaacaggtg cctaactgcc tggccatgct aagcgcctga gccctgggac |
| 178681 | agggtatgat ccMagccctt cacagtgcct gaccctgacg ggcatgcact tggtaagtgt |
| 178741 | tcattctggg gacctggaac aagcgaagct caagccctcc ttctgttctt ggaaaactcc |
| 178801 | tcctccccat ggcagctgca tctcgaccac caatcctact ggaccacagg atgcaggagg |
| 178861 | actacactgt gtcctggatc tcgtcattac aagagcagga ggtgagcact gagaaagatc |
| 178921 | cagaagaact catgcaagca gaggctgtgg tctgtgggga ggagggccgg gcagggcagc |
| 178981 | ggaccagagg aagaagcaac aaagaaggaa ggggaagagg aggaggagga ggaggggggc |
| 179041 | cgcagagtca ctgtgggtgg agggagagca ccgccagcac atgccccaca gccatcaata |
| 179101 | tctcttcgga ggacagatta tctggggaat ttatgctctc taataattac cttgcagagg |
| 179161 | gttccactta tcttaccaga ggaatctgcc agttgccaga cacacaggat tctagtcaat |
| 179221 | tccatccaca ctgccctccc cctctgccct cctccccacc tccctggctc ctgacttctg |
| 179281 | acctctgaat tctaaccttt ctttgcctct ccagtctagg gggaRgttga tggtggaagg |
| 179341 | gtcacaacaa cttttaacag atgtaaaggc caacaaaggg gttggtgggt tgtcccttat |
| 179401 | cagtagatat gagagttaac gtcccaaagt tgaggccagg cctgaggaag tataggctct |
| 179461 | tgccaaagac agtgtgtgaa gggccaagca atgctttggg gcagactgac Wtgattattt |
| 179521 | ttgtcttcac ctgatgccat cagacctggt taggattaat tttatcttct agtcttcaca |
| 179581 | tccctcctca aagccttcct atccccaStc cagccctcca gtgaggcctc cctccaataa |
| 179641 | tggYgtggct acttattcga aaaccatcac gtgttgcttt gggttgctgt ggtttcttta |
| 179701 | aacgcacgtt gcagtcctgg ctgtgagctc ctggagaaca tgggtactgc atccgtactg |
| 179761 | aatcaggact acctgagcaa cagtaacaac atccagatgg ccctgacRgt gggcgggaca |
| 179821 | gtgccctccc tgcttagaaa caggaaccac atttcatctc cacaacaacc ctatgaaaga |
| 179881 | gatgctacta ctacccctca ttatacagct gaggacctgg gagctcagac agcttcagtc |
| 179941 | acaggcccac ggtcacttgg tcagtggcca agtcaggatt tgaaccaggt ggtcttgttt |
| 180001 | cagagtctgg gctcttaacc actccacacc acgctgcctc Ygtaggagag gtttgctgac |
| 180061 | tgattcggac attttgtgtt gtatctatcc gcttatttaa gtcatccttt tctaaaataa |
| 180121 | taattttttt tgagacatgg tctcgctctg tcactcaggc tgtgcaggag ctctgtcact |
| 180181 | caggagtgca gtggcatggc tcactgcagc ctcgatcttc agagctcaag caattcacct |
| 180241 | acttagctac cccagtagct aggactacag gcatgtgcca ccattcccag ctaatttttt |
| 180301 | tttctttttt taagagagat cgtgtctcac tttgttgccc aggctggtct caaactcctg |
| 180361 | gactcaagtg atccacctgc ctcagcttcc caaagtgctg ctgggattac aggcatgagc |
| 180421 | ctgggtgcac ctgggctggt gctcctcctc cttaggactc cactcactgc tccctcctca |
| 180481 | gggggcctcc cccaaactcc ttagctctgg cactcattct ttttccatca ctctggcacg |
| 180541 | atgccaacta tcaaaaatta ttttataggc taggtgtggg tggctcatgc ctgtaatccc |
| 180601 | agcactttgg gaggccaagg caggcagatt gcttgagccc aggagttcaa gaccagcctg |
| 180661 | ggcaacatag tgagacctct tccctactta aaattaatta attggccagg cacaatggct |
| 180721 | catgcctgta atcctagcac tttgggaggc cgagatggga ggactgcttg agaccaggaa |
| 180781 | ctcgagacca gcctggtcaa caaagcgaga ccccatctct taaaaaataa taataaataa |
| 180841 | aaaataatta attaatgtat atgtttattt actacctgct tttctcaata gatataaaag |
| 180901 | cttcctggga gaaagactgg tctaatttgt tcacccctct atcaccagtg cctaaagctg |
| 180961 | gtccctagca tatagtaggc actatataaa tatgagttgg atgaatgaat tgtctgatgt |
| 181021 | ccccactgag cattccataa tacatgatgg ctacttaatt ggacacttta ttttatgcaa |
| 181081 | actcatctat ctgttcttta tttattagac tttacagtgt accaggcacc ttgctgagta |
| 181141 | ggttaggatt tcactgtacc ctgatatgag gtagagaata ttgtctttat cattctcatg |
| 181201 | ttacagatga ggaaactgag actcagaggt tacacagctt gcccaagacc atacagaaat |
| 181261 | agggtaagac ttaaccccca ttctgtcagt ccccctgagt ccatgatatt aagcattctg |
| 181321 | cctcattgcc tctggctggg tcccctcagt aacatgattc tctttacccc tgaacctcta |
| 181381 | aaatgtcccc agccttactt ctcccccctc aagagccccR tcRcctcttt ctctggcctc |
| 181441 | tgtgtgctgg ctctcctcca ttggtccctc cagattctct ctctgccatt cttttccctg |
| 181501 | ctgggtgctg cggaagtctg tcctgtatgg tcagccattt gccctcttcc ctctgctcct |
| 181561 | ggtggtctgg gtcaatggca ggtgccgaga gagggaagag agacagggga tttcctctcc |
| 181621 | ccgccccttc ctgctgtgga gtgtctgcat ctgcccactg aaggtcacag ctcctgtggg |
| 181681 | ccagccctct tcatacagct acctctgcaa tctggtgacc ttccccactc ccccgaccta |
| 181741 | gccctaggct gctgcactag ccccccacca tgtgagtccc tgcccgcagt tttgaaacta |
| 181801 | gacatgttac taaacactcc tcagtttact tcgtgtggag ctgctgcttt gctggaaccc |
| 181861 | tgcctctcgg acatatgagt gctacatggc ctctgcccct cccccaggtc ccccaccact |
| 181921 | gccgctgccc cYtggtcact gcagctgcct caccaggccc ttctttgctg ccagggtttg |
| 181981 | ttctctgtct cYaagaccta taaataaatg ttgatttgct ggcttgaagg tttgccctgg |
| 182041 | cagccccacc agggagagca gtgccctggg gagcccagca agcccacagc aagctgtcct |
| 182101 | cccaagacta ggagaaagca gagagcatcg ggtccaatgc aggggtcccc tatgctcgga |
| 182161 | gcttccccct gtgcggggtg ttaagggacc cctcagatga tgtcctggtg cctcaaacaa |
| 182221 | agccgccatc acagcttcaa aatcacaRta tcatttgttg agcaactact atgtggcagg |
| 182281 | ttctgggttg ccatttgcat acattcactt tcatgttaaa agacgagaaa aacaRgttca |
| 182341 | cagaggttaa ggaatttaac caaaacctca aaactactaa gtggatgaac tggaattaga |
| 182401 | tcccaggtca gcccaaatct ataaggcctt aattccccac cagtacatgc tgcctcatga |
| 182461 | ccgatccctt tgaatgacag gaggcccaca gactcgaacc tagtccaggc aggcagctca |
| 182521 | gagatgccag ccacccatgg ctgggaggag atcaggtgga gcaggatgac agttaggata |
| 182581 | aagggcacag agggctccat gctgcctaga gtcactttgt ccaaggacca tggcacagtt |
| 182641 | tggccatagt gactgctgag cagccagggg gctggaacat gccccccacc cccgccccca |
| 182701 | accccgaccc actgctcctt cctgcagagc cagccaggag ccatcactcg tccttgggca |
| 182761 | cacaccagca tttcaagaaa acaagcctgc aagcacagac ccctctgagt caggcccagg |
| 182821 | actgtcacga ggagactctg aaggggaggg gagggacagg gtgacacaaa gagggggaag |
| 182881 | gcctcctgcc gctggacctg gagccgactg tgcttcccta agtcctttct gcagccaaaa |
| 182941 | ggcacattcc ctgagaacac cgctcaagat ccaaaggctt tcgcttttta ttttttagga |
| 183001 | agcaatggca aaaaaagaaa agaaaaaaag aaagaaaaga aaagaaaaag aaatccacat |
| 183061 | ttctagtgtt gggagcgatt cttggaggca aacacactct cttgcacaca cacaccccac |
| 183121 | agcgcttccc ccacacagcc caaaatagtc cacaccatgg actcctggag aacccggctc |
| 183181 | agcacagcct cccgaccttg gtccacatga ctgctggcca gctctcagtc cccagggtaa |
| 183241 | caaagtactc caaggacccg Sagtagcagc gcctgctcct acagaccatt tcacccctcc |
| 183301 | cagcgaagtc ccatctgctg tgtctcgatg gagccaggtc cagttagcag aggccacttc |
| 183361 | caatgaccca gtgtggccca aatctccaga gctgacctga acctctctcc ctcaacccct |
| 183421 | ccaaatctta gattgctgct gctgcttctc caggggaatg gctcccacaa cattttatag |
| 183481 | actgcaagga aaatatccag aactgagacc gttcttcaaa ataataattt aaaaaaaaaa |
| 183541 | aacactgctg aaacacagaa ctgggtgtta tcttaaaatc tctgcacaaa tagaatttga |
| 183601 | atgctctcac tccaatcaaa atcattctcc gtccctccct ttaaacactg aaagttcaat |
| 183661 | tccccctaaa gacaggattg caaacatgat taggtccaat taatttatgg agaaactcag |
| 183721 | aatgaaagga gagaaatcaa tagaactgcc ttgttctgat cactaccgca aatgaagtaa |
| 183781 | taatttgaag gagatctgga aagaaaggaa accaaaagtg tcacaccgca gccattggcc |
| 183841 | atttaacaag gcagcattgc cccatgtgga ctggctgggt ggagaagacc actcaagctt |
| 183901 | acaagacact cctggggaca gagggagggg agagacagct gaggtcactt gctttctctt |
| 183961 | cattgtacag catgaggctc actggtggta aattctcctc tttctcacaa aagcaagacg |
| 184021 | taaaagaaag taaaaggcaa aaagcatcca cacaagctgc cagtctaata aggacactgg |
| 184081 | taatctccag gcaggccaag gccatatggg ctccccctgc agcttcatgc taagtttatc |
| 184141 | tccatcctca cactctacct ccatctctct tccatatcca ggaaggaaaa aaggaaatta |
| 184201 | acaagccggc atccaacatc catcctgaat caccagctgg gccatgtaga gcatccaaag |
| 184261 | atggggtRgg gaagccccag gggagagaga gacattgaca gatcaccgtc cccacctctc |
| 184321 | acttgcctgc agctcccttg catagatgat gctggcaaat tcaacRtgat tttcattgga |
| 184381 | cctgcccagc agtccagatg tgggagccta ataacaaata acaatgccag ctccatgtga |
| 184441 | tccttgcacc ttcaagagaa aatgccttgc tggccagctg ggttctctgg ccaccctcca |
| 184501 | gcccaccttg ctgcttctgg atggaggttc gtgaagctgc tcctggccta tccaaatggc |
| 184561 | cagtaaacat taacattcat ccagtcaggc aacatccatg gagtgcctat tccatgccat |
| 184621 | gctgccccat gtgggaggca gcaaagcgct tcagtgaaag gctggggcac tggcatgagg |
| 184681 | acaccaggtt tgagtcccag ctccttgctt acttgctgtc tgagctgttg aactctgtga |
| 184741 | gcttcactac cctcagctgc aaaatgggta tgataataag acccttctca tggcttcact |
| 184801 | gacaagaaca aatgaggtga cctcactatg ggtgatcagt aaatattagt ggttRttacc |
| 184861 | acaatgtggg gtcctaccct ccactcattg ccaccaccag tgccagaaaa agccagctca |
| 184921 | tgagttaact cccaggcagt attatccact ccaggggcct ctctgtccac acagatgagc |
| 184981 | agaagcagaa tgcatgaaaa aataaaatag ctcaatgcca ttgctacaga ttgccccacc |
| 185041 | accaccatct caccagtcag cttcaagcca gcggggtcag cagtcagaag cacagccaag |
| 185101 | agtgtgggga tgattccgtg acaaaccatc cccagcagca gaaacctatc tcacagcaca |
| 185161 | catcctccca gaagtgggtc aagggcatcc attgcctttg tttaaaggca ctgggtcaca |
| 185221 | aaggaggagg agccttagca ggttggaact ttgggatatt ccacaggaca ggtagaaggg |
| 185281 | tgctgtgttg gttttctatt gctgctgaga caaattacta caaactttgt agtttatgaa |
| 185341 | aacacaaatg tacgatttta cggttctaga ggtcagaaat ccaaaacgag tcctaaggct |
| 185401 | aaaaatccag gcatcagcag ggctgtattc cttttggaag ctctaaggga gcagtttctt |
| 185461 | ccttgacttt tccagtttcc agcagctggt ggcctcttcc tcccatgtgt cacttctacc |
| 185521 | tccacttcca aYgtcatatc tccagctctg actctgaccg tcctgtctcc ctcttgcaag |
| 185581 | gacccttgtg attacactgg actcacccac ataagccagg ataatctcct caYctcaaag |
| 185641 | tccttaactt aatcacacct gcaaaatccc tcataccatg taaggtaaca tattcatagg |
| 185701 | ttccaaggat taggacRtgg acatctttgg gggtaaggtc acgcttctat ctaccaaagg |
| 185761 | cgtgttctgc tgctgctgca aggtacactt gaataccgtc aaagcaatgg tgaagaattg |
| 185821 | aaagaaacgc agttatgtcc taagcccagg aatattgaag ctgtcctctt tttgacaaaa |
| 185881 | aaaaaaaaaa aaaaatatat atatatatat atatataagg cagatggtgc ctaagagcat |
| 185941 | aggatttgga accacatcgc tctgggttca aatctaagct tcaccaccag tcccagctga |
| 186001 | agctattcaa gaccagaagc tcatctgtgt gaacttccat tttcccaaca ttgtagggtt |
| 186061 | gatgtatcct aaggaataaa gaacaaaatg cacgcagaat ctttcacacc atgtctggca |
| 186121 | cacagtgaat gcttagtaaa tggcaactaa gaaattgctc ggtactgtta ttctattagt |
| 186181 | ttggttctat cagacccagt cactaaataa accagtttga cgtgaagtac ttggctatca |
| 186241 | gcaaatacta ccaggccctg tcaagtccca ggaatcagag gggctgtttg gccaatgcag |
| 186301 | actgaccctt tcatgctgac gtcagggagc cccagcagag acaaccaaag atctagagac |
| 186361 | atgatcaaaa tttccctgtc aggacatggt ccagaaccat ggatctcagt ttactttccg |
| 186421 | cagaaagaag aagaaaaggt gaagcccgca cacttctctc ttccacaaac tcaggcccca |
| 186481 | ttcccttgta cgtctttctc ttataaacaa ttgcacttta ttttcaattg tgttgtgata |
| 186541 | aatttgagct atagcttaca gtcaacaatt tctatcacaa atctttctgc cttccaattc |
| 186601 | tgtgtatgta caaactgagg ctaggaccaa aggaacRaag actttatctt acatgaatca |
| 186661 | tttgattcca ttactgaaat ctctcaggtg aagttaaaat atatatacac tgggtctata |
| 186721 | ttagaatata tgagacttga atttgatctg ctaattagct gggtgacttt aagaaagtat |
| 186781 | gtaacttatc tgagcatccc tttccccatc tataaaagga ggcagaggcc aggtgcagtg |
| 186841 | gctcatgcct gtaattccag aaggcggagg caggcagatc acttgagctc aggagtttga |
| 186901 | gaccagcctg gacaacatgg cagaacccca tctctaccaa aaatacaaaa aattagccag |
| 186961 | gcatagtggc atgggcctgt ggtcccagct actcaggagg ctgaggtggR agaatcactt |
| 187021 | gagcccggga ggcggaggtt acaataagcc aagatcatgc cactgcactc cagcctgggt |
| 187081 | tacagagtga gatttattta tcactaaata aataaataaa taaatggaga caggaaaatc |
| 187141 | tgcctcttaa gactacagca tgggttaaat agcatgtaaa acctttggca tgttggattt |
| 187201 | ctagagcatg tactatgtct cagacactac aataaacatt gtatgtgcat taattcattg |
| 187261 | aatcctaata acaactctat gaggtgctgt ttattattcc tattttccta gaaagtagac |
| 187321 | ctcttggggc cagggatagt ttttttcatc ttcaactccc aactcaWata ccctgtgagt |
| 187381 | ggtaaatgca agctacaact atcattgtcg atagttgagt ctggaatcac cgcagacgat |
| 187441 | tttataaaga tggaccccaa gaggtaggga ggtttagaga aaaggaggaa ggagagtgtg |
| 187501 | caggtcttcc caatggggta aggYRaggca tgaggaagtg acaagaaatg ccaagccagt |
| 187561 | aagaagacag gacgaagcat cgcacctgga tagaagacta agtaaaacta ccttcctgtg |
| 187621 | gctaaggggt ctactaggat acactcattg acttgctttg gccaacagaa tacagtggaa |
| 187681 | gttagattac accagttcca agctcaggcc tcaagaggcc ttgcaagctt cccttctgct |
| 187741 | ctccgggaac cctgcctagt tgcttagcat atgaatacgc ttgggctagc ctgctggaga |
| 187801 | atgagcagac acagaacaca aacaagctat cctagatgaa gctattcatc taggacaagc |
| 187861 | tgactgcaga cacataggtt aaccagccca aatcagaaga accagctagc tgagcccaaa |
| 187921 | tcgaattgcc gacccacgga atagtaagca aaataaatgg ttgctatttg aagccattaa |
| 187981 | gctttatggt gttttggtat gctgcaaaac taacagaggc aggagtcaat gtctcattca |
| 188041 | tctttatatc ttcaacagcc aataaaagtc ctggcatgta atagttacac agtaaacgct |
| 188101 | tcatgaataa agtattgaac tgatatatca atacagctgt gaataaataa atgtcatatg |
| 188161 | ctggaaaact gaaatcatgt aagatcgcat aattctattg agatacttca gcttaaagaa |
| 188221 | tatttttaaa tggggttggc tgctacctaa ttttaaaatc cattttcttt tttcttccta |
| 188281 | gccaacatcc ttttccacaa agtttagtca aatagaaaag aaagtttcac atgaacatac |
| 188341 | aacgtaggat gYggtgatcR aaaactagac tggttgctta gagatccgag ttctagactc |
| 188401 | aactctccca ataactggga gaccttgcta attctcttaa ttaccatttc tacgtctata |
| 188461 | aaatagatat taaaaaatta cccttccctg tcaacctcac agggttgttg tagcaaataa |
| 188521 | gacagcatgg gaaggctctg agcacttttt accgtcaatg attctacttc cagccaggct |
| 188581 | cagtggctct tgcctgtaat cccagcactt tgggagtctg aggtgggtgg atcacctgag |
| 188641 | gtcgggagtt caagaccagc ctggctaaaa cggtgaaacc ctgtctccac caaaaataca |
| 188701 | aaagtagttg ggtgtggtgg caggcgcctg taatcccagc tactcaggag gctgaggcag |
| 188761 | gagaattgat tgaacccggg aggtggaggt tgcagtgagc caggatcgca ccacggcact |
| 188821 | ctagccaggg aagacagagc tagccttcat ctcaaaaaaa aaaaaaaaaa aaaaaaaaaa |
| 188881 | aagattctac ttcctctata agcagaactt tactttttga tggtttctag tgtttttata |
| 188941 | atatatcctc ttaagagccc catttatcct tttgctgtct tccttttaat attctgtatc |
| 189001 | ccagtagcca tattttcaac atacatacat aYatacatgt atgaaaccaa gataggaaat |
| 189061 | ggttaaaatt atccttgata gtggagaaaa ctattgctct atccaaagag agctggtatt |
| 189121 | tctggcactg aggattacat gtgaccaagg tcagacatga tacctgcaag atgtatcctc |
| 189181 | tagctccaga gttcccatgg agaactcggg gtccctagtt ggctgcagca ggggctgcca |
| 189241 | gctgctaagg atgcagccag atccctttcc ctttccagag acttctgccc agtatgggaa |
| 189301 | gtcagaagct ccacactcca agtatggctc ttccacaacc tcagttcctg ccttgggcca |
| 189361 | agtcttgaga tcagtgtagc tgagctccga gcccaggtct ggcactgcta aatggaaatc |
| 189421 | cttcatcttg gcaactcctt ccaYaatggY agaaccaggt tggaagttca caaggtgctc |
| 189481 | caggcatatc agggcttact gccctctcct aaagctcccg aaacctttgg aagtcacagt |
| 189541 | tctggagtaa acatcaggtg tcctcatacc caagcatctc aggagtgtgc aggaggcagc |
| 189601 | agaaggtagc ctgtgtcctg aggcagtgca ttctccccat cccatgaatg atggggctgg |
| 189661 | acagaagaca tcagggacag caactcaaac cactgggcag gtggggctga atggatgggc |
| 189721 | aacactggcc gtgctcaggg ctctgggtct tccttgacag tgcaattgta atacctccat |
| 189781 | ccttccatca acccatcctc cctatggtgg acataggttg tctgcctgcc cagataccat |
| 189841 | tctacctcct tctagtaaca atacctccat tttctacctc tccctcacta tcagttgtgt |
| 189901 | aaaatcaacc ccactctacc ctccaacttc agagacaggc ttgtgactag gcctggccaa |
| 189961 | taagaaaacc ggccatgttc tagccagcca tggtgactca cacctataat cctagcactt |
| 190021 | tgggaggctg aggaaggagg attatttgag gccaggagtt caagaccagc ctgggtaaca |
| 190081 | tagtgagacc ttgtctctac aaaaattggc caggcatggt gatgcacacc tgtagtccca |
| 190141 | gctactctag aggctgaggt aagaggatcg cttgagccca gtgagccacg attgcaccac |
| 190201 | agcactccaa cctgggcaac agagcaagat catatatgta tatatatata tatgagaaag |
| 190261 | agacccacat cccttagtga tccgttcaag agtgatcagt tcaagggtga aaatgtggtc |
| 190321 | tgaggcaggc aaattagagt caatcctgga acttctgggg gaaagaggca ctttctttct |
| 190381 | cttagtatgg aaaggcagat aacaatatat acctgaagca gctgggagcc Mcccatcaag |
| 190441 | caggcctgtt tacaaaggat gccaatgtaa agaaaagtgg agtttagaga tgaaggagag |
| 190501 | atggagggag tcaagaggac cttgctgagc ccctagaccg agtcacgagt gaagaagata |
| 190561 | cactcacgag ctgttagtta catgagccca cacattcctc tgtgtgctta agcactatga |
| 190621 | gttgagtttc ttgccatttg caaccttaaa aagccctgcc tgatgcacat cccaccattt |
| 190681 | gatgttacca acagactcta ataaggctga ggaagaaccc aggggcccca tccaaatacc |
| 190741 | tctaggctgc ttgaactcaa atgcttttga aataaggatg gttcactgtg gctgtcagat |
| 190801 | gccacacatc aaWcctgaaa ggaaattcta gccagggaat gctacagatg gcagctcacc |
| 190861 | acggccccca ccactcctta ttgtctttgt caagcccatt tcctcattta ctttacctgc |
| 190921 | ctggtccctt taaatacata agtttaccat cccttattag atggataaat agataaatgg |
| 190981 | atRgatggat ggatggatgg atggatggat ggatggatgg acggacacat ggatggatgc |
| 191041 | atggatgcat ggatggatgg atggacacat ggatgcatgg atgcttggat ggatggatgg |
| 191101 | atgcatggat ggatggatgg ttgcatggat ggatggatgc acagatggat gtatggatgc |
| 191161 | atggatgcat gcatgcatgg atggatggat gtgtgcatga atgaatgcat gcatgcacag |
| 191221 | atggatgcat ggatgcacag atggatgcat ggatggatgc atggatgaac ggatgcatgg |
| 191281 | atggatgcat gaatggacgg atgcatggag gaatggatgg atggatagat gcatgggtgg |
| 191341 | atgcatggat gggtgcatgg gtggatgcat gagtggatgc atgggtggat gcagggatgg |
| 191401 | atgcatagat ggataggcag acaagcaagc agttatgtag ttgcaagttg aacctacaca |
| 191461 | caaataggca tgatacaact aaagaattaa aaYggcagcc cactgcagtc agggggccat |
| 191521 | ctgacaatat aggaaaggag ataactatag gcttacttct gtatggtttt gggtgtctgg |
| 191581 | aataacgRga gatgactctc tgggtagcac tcaccctgta gttgtgctcc tccctctcaa |
| 191641 | gccacagtgg ttaacaccac cttaccaata gtgcagtaca aagagaagcc agtcctggca |
| 191701 | ttcacaggta gctgtgaaaa gctggcccta aaaggcagtc tcgctcaatc cccagcatct |
| 191761 | actYggatct gggcaggcag ccacagaaac agaagaagct acagaggatg Saggcactgg |
| 191821 | gttttggtgt ctggacatgg aagaattgca ggccaatatc cacaaatgta tccgtgaggc |
| 191881 | tctggtcttg aaacaaggat gtgaggaccc caggatggct ggtgagggac actaagtggc |
| 191941 | tcaaagaact gagaaaaaaa taaaaacata gcagcaatag agaccagagt ccgagccagg |
| 192001 | acaaggcctg tccctcagcc acctggctga aggcatcatc atgacctcaa ggaggtaact |
| 192061 | ggtgagtcat acagaaccac actgtgcact cttcaccatg gtttatatgc tcacagttca |
| 192121 | ggcaaYtgct tagaaaactg catatcgttc atgcccctat gaatcacttt cctccttttg |
| 192181 | ttgtctttgt gaagtcatca caaagttctg agtggaagaa ttcttccagg gactgccaag |
| 192241 | gagtgacact gtagccaggt gggttcagct ctcactttgc tcaggatatg ggtgtccagt |
| 192301 | ggcgacagat caggaaaata gccccatact aaatggtgcc tggacaaggc ccataMacac |
| 192361 | ttggatatgc tgtcctgaac acaaggcaca agacacaaca cgggaggacc tttcatctca |
| 192421 | tgtctcttac agccagggac tgaaggtgta ggacagtagg agaaaataga gtttcacata |
| 192481 | aaacacccca aggacatcaa agaaggctag ctgccaagag gtaggaagaa ctagattctt |
| 192541 | agggacttat ccttggggat tgataccacc cctgccaggc atccaccttt ggggtgactc |
| 192601 | agagccaaga aaacaaaggc atgggataag ccatggaaaa caaattcctg ctgagtagca |
| 192661 | aagagagtgg caccaacaag tggcaccatg tgagtgacaa gagcaagcaa atgctcacac |
| 192721 | agggacagct gggtgtgcag ggccatcaca gctcccccta cccccaccac ctgaacacta |
| 192781 | cgagacaaat gggactcctg gtttctgccc tcaacatgct tatatttgag agaggccaca |
| 192841 | ggaccagcga gtgcagagtc atggcgaact gtacacaacc tggagtcagg agacccatgt |
| 192901 | tctcaccctg ttctgttgcc tcgggggccc tgaagcccat cgctaagtgt ttKgggctcc |
| 192961 | agtttgctca tctgtcaaga gagaaccctt cacacagctc ctaagtgctg tgagtccctg |
| 193021 | tctctcagac tggctaatct ccaagggcct gccaggtccc acatgcatgc tcttgagagt |
| 193081 | cacatagata tcaaagctca aaattagctc ctgggagtgg gagcaaagct tctgagcccc |
| 193141 | cagcccctcc tgtgagcaca tacctcaagg cacatgcccc caacagccca gaactgacac |
| 193201 | atttttgata gttcctgagt acatggattt ccagccctgg aaatgtttgt tttaacttac |
| 193261 | caggagaaaa gaatttggat tcttttttaa atatacacaa agggaataca tttgtatatt |
| 193321 | ttcagataca aagtggatgg gaagcaaggc taaagactgt tcttttccct tagctcatgt |
| 193381 | gagtgctatt cctcacggtg aattctccaa agaccatgaa tggcagagat ctttgatctc |
| 193441 | ccttctagcc tgtctcgatg tgatagcctg gacatgggca gctatcacgc cacccttcag |
| 193501 | aacctcagca cttcaatgac cacatcctgc catcatcacc cccatggagg tccagggccc |
| 193561 | ctgccccact gcctacctct ccacctgtgc ccacctctcc acctacccgc cccttgtcac |
| 193621 | attgacagat aaaatacagg actcccagtt aaatgcaagt gtcagatgga gaacaaataa |
| 193681 | tattttagta taacatgtgc cttcctaggc agcacaactg aagcaggccc cttccaagga |
| 193741 | tagaaaagtc ctcctctctt cctaagtttg tgtccataga atctcatcca gtggcctttc |
| 193801 | tgtcccctgg cttcaaatga aacctgccac tgcctctctc tcagggtgaa gtgtgaagac |
| 193861 | cgtggcttcc aaggccaata ggcatggagg tagtcatccc attcagacgc caatggttct |
| 193921 | tagtcaaaaa agctgcttat ggctggagtc aaaaacatgt ctaagcgtga ctatcagccc |
| 193981 | cagtgcagaa gagtctgggg agagggagaa acaagaaaca gatattacca caaaacactc |
| 194041 | caagggaaat ctcactacaa aaaaagaggt tgttgcctgg tgatggctgg caatgggcca |
| 194101 | tgaaaaccta gttctgattt ttagatacaa gaSacaagcc caacgtgtca cccagcctgg |
| 194161 | atcccataga ggtcacatgg acaaaacagt acttgaagat ctttgacctg cctaggtggg |
| 194221 | caactggagt ggaagctcca caagggtatg aatgctgtct tttgttttcc tcatctctat |
| 194281 | ggactagtcc atctagtcca ggactagcct cagagtgagc atccgatgat cgtaggaaga |
| 194341 | ctgaatgaat gcgtgaacac atgaatgaat gcctacattc tccaatatgt cccagaaagt |
| 194401 | gtcaagagct ttgtaacgca aaaggctctg aacaactcaa ataagaaaca caaacatgtg |
| 194461 | cagtgaaagg gctaggcctg gatggcctgt gaggtcattg gcaatgtggt gagcccttga |
| 194521 | gcctgtcata cacaggcaaa taacttcact gaaagaattt taaacgctac ctccaacacc |
| 194581 | ctagctcagc atctatggtt gaagccacca tgcccagtca tggtgataac cccagaaggg |
| 194641 | aagggtgcag agacgccaag aaacaagaac ttggagagga caatgaggac caaatgactg |
| 194701 | gggaaataag ggatgagtgg gtaggaatcc aaagaacaga ataggaaaaa taactcaaga |
| 194761 | tccagcactg ctttccagga cacacacaca cacacacaca cacacacaca cacacacaca |
| 194821 | cacgcagaca aagattcccc ccttccagat ccacactgcg tgcctcctgc cagccccatc |
| 194881 | ccatcatcct gtgacagtgc ttctttgtgg aatagaacaa taggtacatt atgccaacct |
| 194941 | ataattatcc taggagaagc gatggcgaag tcaaggcatt atgtgaacac tggaatactg |
| 195001 | gataccaccc caccaggagc aaacaacaac aaaaacaaca acaatccaca aaatctctaa |
| 195061 | cgcagataaa gactgaaagc tgcctaagcc agtgcccttt cacattcata tgagggtggg |
| 195121 | attttttcct tttcacatga ttatttaagc acaaggcctt ctttcatgga attgatagag |
| 195181 | tattggggga aggggctgag aggttgggtt tgtttgtgtt tttgtttttt ttcccaataa |
| 195241 | ggaggcagaa agtagaggag gtcgtgagca cgagaaagtg ccactgctag ggtatgacac |
| 195301 | atagagccct caaaggtagt tgaatctgat tcWactgagt gaaatcattt cattaataga |
| 195361 | gattccttct cactactcct gtgaaactac tttccaggga cgttggtata aaataggctg |
| 195421 | agtcctggga ggtgtcatgg aagacagaga caagaaatca gaatatctga attcttatat |
| 195481 | cacagccact aactagctgt ttccttgatt tattcaagag gtatgtgttc cctatctgcc |
| 195541 | acatgctagg catcaagcta gcaacagaag gaaaaaacaa agcagtagtc actttcctct |
| 195601 | cggagcttca gcttcctact gtgtaaaacg agggagtccc acagccctgg acacacNcac |
| 195661 | acacacaMac acacaSacac acacacactt ctaaatacaa ggtgcagccc cagcctccca |
| 195721 | caggacctgc ctatacaggc catgactgaa gaagggggaa acctgcagct tctaaaactg |
| 195781 | cacagaaggc tgggcacagt ggctYacacc tgtaatccca gcactttggg agggcgaggt |
| 195841 | gggcagatca cctgaggtcg ggagtttgag accagcctga ccaacatgga gaaaccctgt |
| 195901 | ctctactaaa aatacaaaat tagccgggca tggtggcagg taactgtaat cccagctact |
| 195961 | caggaggctg aggtaggaga atcacttgaa cccaggaRgc agaggttgcg gtgatctgag |
| 196021 | atcacgccat tgcactccag cctgggcaac aagagtgaaa ctctaYctcc aaaaaaaaaa |
| 196081 | aaactgcatg gaagcccaaa cccccagggc aaatggaaca gtcacagcat gccatgcacg |
| 196141 | cacagggtca gagcaagagt atggccaggc gcggtggctc acacctgtaa ttccagcact |
| 196201 | ttgggaggcc gaggtgggca gatcacttca ggtcaggagt tcaagaccag cctggccaac |
| 196261 | aaggtgaaat cccgtctcta ctaaaaatac aaaaattagt tggacattgt aatgggcgcc |
| 196321 | tgtaatctca gctacttggg aggcctgggt attagaatcg cttgaacctg ggaggcggag |
| 196381 | gttgcagtga gttgagattg tgccactgca ctctNcNtgg gtgacagagc aagactctgt |
| 196441 | ctcaaaaata aataaataaa ataacaaagg tgtgaaaagt aggatgggtg tttcctagca |
| 196501 | catctctagt ttctgagggc tctctctaat ggggaccYtc ctcttgaatt gtggtcccat |
| 196561 | gggttccaYc tcttctggga tccagtcagg gcttcttcct tcattctcag gcaccttcag |
| 196621 | Mcttgaaact ccttggcctc ctttcccttc accttcctgg tgaaacataa cagagggtct |
| 196681 | tcgagacaat tcctttaaat catcaaaggg cctatctagc aatgtctaac tccattcctt |
| 196741 | aacgtttact gaaaagctcc tcaaatacat gatcctcccc tctacccgtt cccctcagct |
| 196801 | cttagYcatc cttcctcaga tgStactttt tcatagggac taatttcttc cttcttgcca |
| 196861 | aatccagtgg ccacccgtgg gtggtcctgc tgctcaacca acgtatgaca gtattagcca |
| 196921 | tgcgctcctt gaaacactca gagccttgat tctactcatt catttagttc ctccccaaaa |
| 196981 | gttccctgag cccctgctag gcagtgggga tttggcaata agacccagtc cttagtcctc |
| 197041 | tgctcatctc tccacactcc gctcttatgg ctccaactct cacatcagca aagggctttc |
| 197101 | aaagactcaa agcacctcca cactcattac ctcttgtaat aacaaaattc aactctgcaa |
| 197161 | actttgcaaa acactttata tcgtaatcct tttttcccca cccScactgg gcgaaagaac |
| 197221 | ctattcttgc aaccaacact atcctgaaaa tgtggaaaac ctctaatgga agtgcaacca |
| 197281 | agtgctcctg gaattcgaca tgctttttta tgtccttccc acccctagtt ctcccctccc |
| 197341 | tgcccactct cccttcgcac ttcgcttgcc taccttacag cagagttcat tttgtcggtc |
| 197401 | tcttctaagt ggtgggctcc tggagggctt ccaaYggact gatctctttg tagactccat |
| 197461 | attactcggt gcttaaatat ttgttgaaat gcagcaagat cagggagtaa ttcagcacca |
| 197521 | attgtttacc tgatcctgga aacctcatct ctgccccctc cattccccag gagagtctgc |
| 197581 | ccatttgaaa actgttcctg ggtttatttc tagcatggcc ctggagaggg ctgccctacc |
| 197641 | ccgcagggtc agggaggtga gttttctctc accttgggta ctgcagagcc caccaccagt |
| 197701 | ccaccctgaa acctcaaagc aggcccacag ggtagatatc tagggacctt gaagcaaaca |
| 197761 | tttcacctat tcaggacaca aactaaataa gcttgtgtcg cttagtaatt ctgtaatgtc |
| 197821 | ttacttatgc ccttgggcaa actccttaaa ataYttgttt ctgttttccc atcaataaaa |
| 197881 | tgagaattga agcacctatt tcttaggatt attgtgaaga tttgatgaat taacactagg |
| 197941 | aaatgtgcct agcactgttt aatatgtggc agaggctcaa taaatacatt attattatta |
| 198001 | ttactattat tgacaggtta aaggcctgtg atgatactga ctccagcata actctgatac |
| 198061 | tgcccctttg actcggctag ttttgacaga gggccctttg acaacaccta aaaaacaaac |
| 198121 | cactaaactt tcagttttta aaaaaatacc aggtaagctg ggtacagttg gctcacgcct |
| 198181 | gtaatcccag aacttgggga ggccaaggct agaggatgat aggaggatct cttgaggcca |
| 198241 | gtttttaaca accaactctc cagYgaacta atccattcct gccagaacaa atccagtctt |
| 198301 | acaagagtat gaatattaga gctacaaggt accgccaaga gacagggttt tgctttgttg |
| 198361 | accaagacca gcctggtcaa cataggaaga ccccatctct acaacaaatt taaaaattag |
| 198421 | ccaggcttgg tggcacatac atagtcctag ctactcagga ggctgaggca ggaagatcac |
| 198481 | ttgagccctg gagttggagg ctgcagtgag ttatgatcac gccactgcat tccagcctgg |
| 198541 | gcgacagagc aagaacctgt ctctaaaaca acaacaacaa caacaacaag taatgtgaga |
| 198601 | aacaaatgcc ctccctccct ccctgagggt cacccccagc ctgacctgat ggatgggaaa |
| 198661 | agataagctc agagatgggg taaggataag gtgggagtta ggaatggggt agaggtcagg |
| 198721 | gatggactga gaactaggaa agggaaggat caaagatgga ctggaggtct ggaagcagga |
| 198781 | agagagaaat ggagtaaggg tcagggctgg agaccagcag aaccgaggtg aaatKtagga |
| 198841 | ccatctgatg gatggtcaca ttaataactt taatttttca ccaccagctc ccactacagc |
| 198901 | atccaaacat cctgctctga aggagtggga gcagggacag ggaagaagaa gaaaccttaa |
| 198961 | ctgagtgaac attttaaaac aagcaggaca tttcgaactc aaatagtaag agtcactttg |
| 199021 | ctgtccaaat cccaccagtc cttggtgtaa tactacaagt gggacttaca agcaggaccc |
| 199081 | gcaagaaggt tctagtaact acctcagctt gcaggacgta aaatgcctgg cgaactttgc |
| 199141 | attccaagga caggagtctt ccaaattaaa attttaatag tgtgtgaaaa tagttcgcca |
| 199201 | tttactctta ggatgaggta gtgtttagaa agtcagcctg gaaatccagg ccaacatttt |
| 199261 | cagggatgcc tcctRttctg ggaggagaaa aaccagcttg ttgcttccct ccagtagcac |
| 199321 | aaagcagcag ggaacYggaa agagagaggg gtctgaacag cttcttctac caggaaacca |
| 199381 | gccaaaggtc tccgggcatg taaggacatc tgttttcaga agctatggtt tggattttgg |
| 199441 | cattcttagg agtctaggag caatcctact aatttgggtt ctagctccaa ccatactacc |
| 199501 | tacctgctgt gcgaacccag gcaagtgatt ttacctctct gagcctctgt ttgctcatct |
| 199561 | ggccctctag acaagattaa cttggcagtg ccttgtagct ctaatattca tactctcata |
| 199621 | agactggatt tgttctcaca ggaatgaatt agttccctgg agagttggtt gttaaaacac |
| 199681 | cagggccccc ttgggtttcc ccatcttcac acgtgtctac tttccctttg accttccctg |
| 199741 | ccatgttgtg atgcagaagg aaagccctcg ccagaggaca gggccatgcc cttgaacttc |
| 199801 | tcagcctgca gaaccataag ctaaataaat ctcttttctt tataaatgat ccagttcctg |
| 199861 | gtattccatt acagcaacac agacagacac tcccacatca tcRtcacaca gggcttgggc |
| 199921 | tgcctggccc tggccactgc ctgccaacac caggcctggt ccctccatca tctaggacct |
| 199981 | tggggaacat ggcaccggtg aagggcatgg gggttaYcag aaagagtgag aagtcggcag |
| 200041 | gtcagcacgg ccacacaagc caccctctcc caacttatgt gcaggcatga tggctcccca |
| 200101 | tccaccagca ctcctgaggc cactacacca gggaggaaag Wagtgcatgg ggaggcctgg |
| 200161 | tcacacctgc ccttcctttc agaaccctgc atgtggctga tggcaggtcc tcggcgcctg |
| 200221 | gtggaagaga aagggaaggt ggcactgggc tccacaggca gtgattctca gccctgcttg |
| 200281 | tcactgggag ctggttcctg ggtcccaccc caatctctta tgattccata gatcaggagg |
| 200341 | agacccaaga acccaacttt tcacttagct ctccagggaa taccaatgca aacggccact |
| 200401 | gaccacccct tgagcgccct gtggatgaga gggtggaact agaggttcta gaagcaagtg |
| 200461 | cttgagtccc ctcactagct gaatgactct gggcagttta catctccttt caaaccctca |
| 200521 | actgcccatc tgagaaatgg ggatataaaa gYgtctgctt cttggggtta tttagagaaa |
| 200581 | tacatgagaa aaaggatgga aagcacttag cactgtgcct gtacatgttg agaatctata |
| 200641 | agagaagatc ccctcttact attcaggggt gacttgtaca aatgccttct tccatagcaa |
| 200701 | tcccttacta aactggagca tttcataggg aagatgcgaa taagggcaat gaagcctcag |
| 200761 | atacagaggg cagcggagtg ctgagacacc tccgtgccct cccacaacat cccagtgctg |
| 200821 | tggtccagca acatacccgc cccatccctc caactcagaa catgctcRtt gatgtgcctg |
| 200881 | aacccaggct aaatgggagc acacctatag tgggggttcc cctgtcagag atatgcactg |
| 200941 | caagggcctg cggtccagga cacagaggaa ggaagagacg ggMggagaaY gtgaatcaca |
| 201001 | ttcatgccag ggtgtgttct aatacgtcag caaatgtgta ccgaScttcc gggctgcaga |
| 201061 | ggaaggtggg cgtgtgtggg gttagtgact tgaagggaaa gaggggcatg aaaaagaagg |
| 201121 | gggtgaagag ttagaactgg tgcagcagct gggtctcaca cacaaatggc atgactctac |
| 201181 | ttcacaggaa ctactcagaa agggaaaaga ataactctaa gaaacaaaga tctgcctcca |
| 201241 | aatccaagaa tggcagtaga aaatagggtc ccccacccag caagcaccca catcacgttt |
| 201301 | catcagaaga actctctatt ctcagccagg cctggcacac tgccttgacc ttcccgatcc |
| 201361 | tggagctggg ccctgggctc agaagacccc agactgtcat tgctggaaac agaatcattg |
| 201421 | cagatatagt tagtcaagat gaagtcacac tggaatagag tgagccctaa tcttacagga |
| 201481 | ctagtgagtt agtccatttg tattactata aaggaatgcc taagacttgg taatttgtaa |
| 201541 | agaaaagagg tatatttcac agttctgcag gctgtagagc aaccacggtg ccggcatctg |
| 201601 | cttctggtga ggcttcagga agctacaatc atggcggaag gtgaaaagga gagcaggcgt |
| 201661 | gtcacatggt gagagcaaga ccaaggcagc aagggtggga agtcccagac tttcaaacaa |
| 201721 | ccagatcttg tgtgaactaa ctgggtgaga cttcactcat caccaagtgg acggtgctaa |
| 201781 | gccattcgtg agagatccac cctcatggtc taataatctc ccaccaggcc tcacctccaa |
| 201841 | cattgggaat cacatttcag catgagcttt gcaggggaca aacattcaaa tcatatcaat |
| 201901 | tagtgtcctt ataaaaaagg gaagtttgcc ccatgaagga agagattggg gtgatgtgcc |
| 201961 | tacaaagcaa ggaatgccaa agataagact gccagccaag ccccagaagc cagcagagag |
| 202021 | gcctggaaca gattcttcct cacagccctc agaaggaacc aaccttgcca acaccttgat |
| 202081 | cttggacttt tagcctccag actatgataa aataaatttc tgtgaagtta cccagtctgt |
| 202141 | ggcacttaca gccaccctaa caaactaata cacccagaac cttactatcc ttcaccacac |
| 202201 | cgatcaccaa tgaggcaagt cagaaatttc caaaaagtct ccacatttat ttttctaccc |
| 202261 | aataaaccag acatgataga ggaattcaaa tataaacaag acataggccc tgccttccag |
| 202321 | agctcctagg cacacaaatg ttagtcactt tacactttgc aaaacacttt cacatatatt |
| 202381 | gtctcttgta gatcccccca tctcacattg agatgggaag ggcaaSctgt aggttactcc |
| 202441 | cattctgcag atgagaacac tgagttttgg agagttggtg gcttgctcca gggcacccag |
| 202501 | ccctggagcg gcagagaggg agctgcagta aagtcttgag tccaagacaa cattggtgtg |
| 202561 | gctgttttct ttcagcctgt cttgctgcct ctcctgccgt cttggaacct cttgcctcct |
| 202621 | tcaaacagaa gcccctgcac tgaggtctct tgtatctaag atctgcccca agtgagctcc |
| 202681 | aggaggcaag gagggaggcc agccatgtta aagaccaagt taaagaccaa agtggctgca |
| 202741 | gcaccatgag ataccagtgt agtcccccac cttctctcat agtcccttac cctgaggctg |
| 202801 | ctcccaccag ccccgcttac ctttttccca tccccacccc Mggcccccag cctctcccat |
| 202861 | cccacaggca gggcaggttc ctggtaacag cattgcccag tgttgtcaaa atagcgagga |
| 202921 | gctggaaaga attccagaat gaaatctatg tgcctctgca gcctcccaac tgactgCCac |
| 202981 | tgtggcagct aaacccgcta atgtgctaag cgttttctgg cagggccagg aggcagggtt |
| 203041 | ggtattttgg gagctgggag gggcttggag gcaacatcct cggcaagtct gggaaggagg |
| 203101 | tggaggcagg gaggcaaagg gaaccgaccc agaacacttc ccatgacgtc accgagagcc |
| 203161 | acctgagctg cacctcagga ttcctgaaac actgctggcg gagcggagag tacggagagt |
| 203221 | acgctgggcc cggtgggcag ggctcagcag ggcatggagg ctttgtagct aggcctgggg |
| 203281 | ggagagggcg ctctagtatg ccacttgtca Ygtacacttt ttctgctgac acagagcagt |
| 203341 | gtgcaatgcg tccgggaggc tgggcagccc agggctggcc caagctctgt ttgcctgagt |
| 203401 | tggcagtggc agggcccatg gtgaccaaac aaaagacggg aagccaaacg cccagaggct |
| 203461 | ggcgggtgag gctccctgag agggctctga ggatacaggc actggcgaag aagggccagg |
| 203521 | ggctcatagg gataggaatg ggKttggggg caatgggaac ttgcaggcag ggtcccctct |
| 203581 | ggtttcccag acacaccgca tcgcctctgg gcatcagcct ctccacactg tccttgcttt |
| 203641 | tcgggggctc cttcgaaaat gcttcaaacc atgacaccag gaaggggagc aaaccaccaa |
| 203701 | atctgagatc caaacaaggt cccagcattc ctttgtccct gatgggctYg gctccaaatt |
| 203761 | ctgggagaaa ccagagggtt ttgagagagt caggagaggg gttcagggga caaaaaatag |
| 203821 | ggctggtgaa gaattccttc cgggagccgt ctggtagcag ggagtaccgt gggtggcaag |
| 203881 | gccgtgctgc tcaggtgagg ggacatggtg tcattctggg aacagatgag ccagtaaaac |
| 203941 | cctgacagga ttcaatctgg aggaaaaaaa tcccagctga taggaactgc tgagcgcttg |
| 204001 | cagcttttaa agcccctcta gcaaaaggat ctgcaaaagY tttgcaaact ctgaccacgc |
| 204061 | agccagtcag ccacttccca gcccacagca acgagagagt ttttgctaca tcagaacaaa |
| 204121 | cccactcaca aatatctcat cctggcctcc cccccggcac ccattccttt tgggtctgtg |
| 204181 | tgcctgcctt cctcagaaat gacattttgt cagagcagtg agagatagtg ttgcaggggc |
| 204241 | caaaggcagc cagggggctg gactgcaaMt aggctcccct gctcactagc ggctgacccc |
| 204301 | aggcagggYa cttaaccttt atgaatctca ttttttaatc tgcaaaaatg caaataatga |
| 204361 | agctgctctt acagagttgg tgagaggact aaatgagatg atggatgctg gggctcgagc |
| 204421 | acagaRatga ggggctccat gacggctggt ccccctcctt cccaccttcc tctccagggc |
| 204481 | cctccggcac cataatcagt gtgggaagga tgcagaacaa tgggagttta attcagaggt |
| 204541 | tggcgaggca aaggcatact ttaatagaat tctctctcgc ccagtacatg gtttcttgtc |
| 204601 | caccccaccc acctttcccc atctctaccg gctgatagtc tctcagctag tagacctttt |
| 204661 | cttgtttagc agggccactt tttttaaaaa ctccagacgg gtaccctcca tgttgcaggc |
| 204721 | gacgtggccc tggatcactc aactgactgt catttgaatg gtgcccccag agtgaggcaa |
| 204781 | tggtgcagcc ctcctaaggc ccttcctgag tgtccctcct tcatgaagat gattctgagg |
| 204841 | cttcccaggc cttcaccctt ctttgaaagc ccatagcagt tcatatgcac ttctcttcta |
| 204901 | tgctcaccaa actctgcctt catcatactt gggggatgtg tgtgagagcg agagagagag |
| 204961 | tccagcaggg attagatctg acttttatat tctctacagt gcctggcaca atgctaacac |
| 205021 | atttgatgag gccagaatta ccctgatacc aaaaccagtt aaagacatta ccaaaaagaa |
| 205081 | ctttttcaat attttaattc ttacctcata ccctagataa aaattaactt gagcSgggtg |
| 205141 | tggttgctga cacctgtaat cccagcactt tgggaggctg aagcagacgg atctcttgag |
| 205201 | accaggagtt tgagaccagc ctggccaaca aggtgaaacc ccgtctctac taaaaatata |
| 205261 | aaaattagYt ggtcatgatg gcaggtgcct gtaagcccag ctacttggga ggctgaggag |
| 205321 | aaYtgcttaa ccgggaaggc agatgttgca gtgagccgag atcRcgccac tgcactccag |
| 205381 | cctaggcgac agagcgagac tccgtctcca aaaaaaaaaa aaaattaact cgacatggat |
| 205441 | cgtagagcta aatggaagac taaaactttc aaacttcaga aagaaaactt ggaagaaact |
| 205501 | ttttctaacc ttgggttaag caaaaatttt cttaaatagg acataaaatg catgagtcgt |
| 205561 | aaaggaaaaa aattgataca ttggacttca ccaacatttt aaatgtctac tctttgaaag |
| 205621 | gcactaatat gaaaatgaaa acacaagcta cagactgaga gaaaatattt gcaaaacata |
| 205681 | tatctgataa aggatgttta gtcagaatat ataaagaact cctaaaactc aataagaaga |
| 205741 | caaatgactc catttctttt aaggtcaaag aactgaacag acatttcaca aaagaaaaga |
| 205801 | tacagatggc caaaaagcac atcaaaaaaa aaaggttcaa cattattagt tagcagggaa |
| 205861 | atgcaattaa aatcacaatg agataccgtt aaacatctat tataatggct aaaatttaaa |
| 205921 | aggctgacaa tgccaagctc tggcaaggat atagaataac tacgactctt acacactgcg |
| 205981 | tgtgggaatg ctaactggta cagccacttt ggaaagcagt ttggcaattt cttttaaagt |
| 206041 | taaatataca attatatttt catttctccc agagatttgc tcaaaagaaa taaaaacata |
| 206101 | tgtctacaca aagacctata aataggaata ttcatagcag ctttctgcat aatggccaaa |
| 206161 | acttgggaac acccaagtgc tcatcagttg gtaaatgaat aagcaagttg ccatgcagcc |
| 206221 | acacagtgga acgcacccat acatgcagta acatggataa gtcttaaacg catggtatca |
| 206281 | gttcctattg ctactctaac aaattactaS aaactcagta gcttaaaaca acacagattt |
| 206341 | actgtcttac agttctggag gtcagaacgt ccgaaatcag tctcactggg ccagcatcaa |
| 206401 | ggtcagtttc cttatctttt tcagctccta gaagccacct gcattccttg acccatggcc |
| 206461 | ccttcctcca aagccagttg tgttgcatct tctatctaac tgcttaaggg aacaggactt |
| 206521 | tatcaaggca cagagccaca gcaagtatgg gaaacatata agtagttcca tatttccagg |
| 206581 | gtgtgtaatg taacatttcR aagataagga aactgagatt cagagagatc caatatctta |
| 206641 | cccaaggtcc aggacacagt gaaaatcatg ttcaacccta aggcctctga atccaaatcc |
| 206701 | agagtccacg tgagccctca gacttccctg ccttgaccgt ggatagtcat ctccaccttg |
| 206761 | tctcagagcc ctgcactccc accctWgtac actgcRccag cagctaagcc tgtggagcca |
| 206821 | ggcagaaccc tgggcctccc cacctcccca ccctgggacc aacagattcc cagctccagc |
| 206881 | aggataacat cataacctta ataagattga catttgcatc ctgttttata ttcatcagca |
| 206941 | ttcttacact tacgttatgt tatctggcct tctccatcgt atgagtctaa tggtgcagat |
| 207001 | attctccacc ccacattctc caaccctcag aaagctgagg tactttctta tacagcaagt |
| 207061 | gggtagaagc caagatcaga accttacccc caacccaccc cttgatacca gaagagccta |
| 207121 | ttgactcaga acaaaactca ggcaaacccc ccacctagct gagcttcccc tccttcatct |
| 207181 | gcaggatgga aaacagggta atacctgccc tgcctatcct gatacatcag gcataaatgg |
| 207241 | aaaaaaaaaa aaggaagtag tatgtaaaag cactttggaa atgttaaaat gctatgcaaa |
| 207301 | ttataaggaa ctgttctgat tatactctca agaaatgtca caaattttct ccaaaagtga |
| 207361 | ataattgtca ttacttttca acttcatccc cttgaaaagc cagtttctcc tcctgtcatc |
| 207421 | ttttatttct ggttaaagca gagatgttat actcaacatt ccaactggaa tatcaagatc |
| 207481 | aatctttaat tcctccttcc agcttcaccc tttctgaaat caagaacagg caattctcta |
| 207541 | ctccacccac catctcatcc tcagtttctc ttgccatctg cccccctctg aagctagaaa |
| 207601 | tcaccagcaa ccattttcat tcctcatccc tcYggtctct cctcagtcag agccaaccta |
| 207661 | catgatgcaa aagcaccact ccaatcacct ctctcagagg ctcacagccc cggggggaca |
| 207721 | gcRtccaggg gtcctccacg ggctgcccca gtgaagctct ccagcttgtc tcccatgact |
| 207781 | caccaaccca ggtaagccta aatggccctg tttcccaaaa ctcaactctc ttcccacttt |
| 207841 | tatgtcccca ctatatctgg aactcccttt cccactattt aattagctat gggggtagga |
| 207901 | agaatcaaac tagaccccca gctcttacat caacctaaat atattccaag tgaatcaaag |
| 207961 | aattgtggtt aatggctggg cacggtggct cacacctgta atcccagcac tttaagaggc |
| 208021 | caaggYgggt ggatcacctg aggtcagagg ttcgagacca gcctggctgg gtaacatggc |
| 208081 | aaaaccccgt ctcaactaaa aaataataat aataatacaa aaattagcca ggcatggtgg |
| 208141 | cgcaagccgg tagtcccagc tacttaggag gccaaggcag gagaattgct tgaacccacc |
| 208201 | cagcagatgg atgtttcagt gagccaagat tgcaccattg cactccagcc tgggcaacag |
| 208261 | agcaagacac cacctcacaa caaaaaccac acacacacaa agaattgagg ttaaaaaaaa |
| 208321 | tccagattat atagatgaat atctatctga tagctgaatg gggctggaat ttctaggcta |
| 208381 | catagcaatg gagtaaatca gaggagaata aaatgaataa tagttaacat ttacctattt |
| 208441 | tcacttcttt taactggata tccatatttt aaaagtaaac atacccttta cttcatgttg |
| 208501 | tacacaaaaa ataacaaaat ggatcacaga atgaaagaaa tgctaaaatt agaaaaattc |
| 208561 | cagaagaagg ccaagcacgg tggcctgtaa tcccagcact ttgggaggcc aaggtgggca |
| 208621 | gatcacYtga ggtcacgggt ttgaaaccag cctggccaac aYggtgaaac ccctattaaa |
| 208681 | aatacaaaaa ttagctgggc atggtggtac acacatgtaa tcccagctat tcaaatggct |
| 208741 | gaggcacaag aatcccttga acccaggagt cagaagttgc agtgagcagt gatcgagcca |
| 208801 | ctgcactcca gcttgggcaa cagagcgaga ctctgcctca aaaaaaaaaa caaacttcca |
| 208861 | gaagaaaaca tggggaaaat cttcataacc ttggtgtagg caaagattct taggacacag |
| 208921 | aaaataagaa tcacaaaagg gaaaaataac ctggacttca aaattaaaaa tttctgctct |
| 208981 | tcaaaagaca ttgttatgct gggtgtggtg gctcatacct gtaatcccag cacactggga |
| 209041 | gaccaagacg ggaggatcat ttgagaccag gaattccaga ccagcctggg aaacacagaa |
| 209101 | agaccctaWc tctacaaaga agtttattaa ccaggtgtgg tggctcatgc ctgccgtccc |
| 209161 | agctacatcg caggctgagg cgagaggact gcttgagccc acgagttcga ggttacagta |
| 209221 | agctttgatc atgccattgc actccagtgt gggcaacaaa gaccttgtct ctaaaaagat |
| 209281 | aaaaatttaa aaattaaaaa gacattgttt aagataggag atatggttgt acaacaatgg |
| 209341 | gagtataatt cacaccacta aatactcaac atgattccaa tggcatcttt tatgttacgt |
| 209401 | atattttact acaatttttt taaaagatgt tgttaagagg atgaatagac aagccacaga |
| 209461 | ttgggagaaa tgattcatag tacatatatg tacatagtat agtcatacag tatatagata |
| 209521 | catgtataca cagtacatat atagcacata catgtacata catacatata tgacaaagga |
| 209581 | tctatatcca gaatatataa agaactctag caatttagta ataaggcaaa caacacaaca |
| 209641 | aaagatttga acagaccctg cacaaaagaa gatagccaat aagcacgtga aaatatgctc |
| 209701 | agcatcatca gtcattaggg aaatgcccac taaaactaca gYaagctacY gttcacaccc |
| 209761 | attaaaatgg ctaaaattca aaagactggt aatgtcacct gctggtgaga atatatRgca |
| 209821 | accaaaagca cagccactgc tgacgggaat atgcaatggt gcaaccactt tagaaaatag |
| 209881 | tatggtagct gcttattcta aaaacatgca tttaccatat gattgagaag tttcactact |
| 209941 | aagtatttat ccaaaagaaa tgggggaaaa tggtatgtca aaaaagagac atacacagat |
| 210001 | gctcgtggca actttattca taatagccaa aaactggaaa caacccaaat gtccatcaac |
| 210061 | tggtgaatga ttacaatatt ttggaaaatt catatgatga aaaactcagc aaaaaaaaag |
| 210121 | atgttactgc attggtatca ggactgaaaa aaataaaaat aaaaattagc tgctaatgta |
| 210181 | cacaacaatg Yggataagac ttttttttta aaaggccgag tgaaataagc tagattcaaa |
| 210241 | agagtagata gtggtcaggc atggtggctc acatctataa tcccagcact ttggaaggcc |
| 210301 | tggggcgagt ggattgcttg agcccaggag ttcaagacca gcctgggcRa catgggaaaa |
| 210361 | ccccatctct actaaaaata caaaaattta gccaggtgtg gtgatatgta cctgtggtcc |
| 210421 | cagctactag ggagactgag gtgggaggat cacttgagcc caggaggcaa aggttgcagt |
| 210481 | gagctgagat tgcaccacta cactccaacc tgggcgacaa agtgagaact tgtcttatta |
| 210541 | aaaaacaaaa ggtagatagt gtatgattgt gtttacatga actcttagaa tcagcaaaat |
| 210601 | taatctacag ttacagagag ggggtgagta caaagaggca ctaaggaact tttggggata |
| 210661 | ataataatat tctattgtgg ttacatgggt atacacattt gttaaaattc atagaactat |
| 210721 | ataYtttgaa tgagtacatt ttattgaatg taaattatac catagtttta aaagaacttt |
| 210781 | ttaaaagtca agatgcaaac tggggaaaat atttgccaca tgtatgacaa attaatattc |
| 210841 | ttaatataca aaatgtcatg caaattgata taaaaagcat taagacctca acaggcaaat |
| 210901 | ggccaaaaga cacagaaaag ccacaaaaga ggaaataaga atatctaata aacaggttaa |
| 210961 | aattaaagca atgaaatact gtatttcaca aaccaaatga gcaaatttca cctatcaaat |
| 211021 | gagttttttt gtttttgttt tttgctttga tgataatttt tgttttgttt ttactttaat |
| 211081 | gataatacta gtattgtagg acaagatgag cactcttctg gtaaaaatat aaattgatac |
| 211141 | atttctagaa cacaatttgg aacactatta tataagcttt agcaggaaca ttaaagttaa |
| 211201 | gacccaaaac cttaacaatt ttcagattat ttgacccact tctagaaacc tgtgctaagg |
| 211261 | aataaacaaa gatgaatgat caaaattaga gatttacagg caagagtttt cagccaggca |
| 211321 | ctgtggttca cacctataat cccagcactt tgggaggtca agctgggagg atcacttgag |
| 211381 | gtcaggagtt cgagaccagc ctgggcaaca tgatgaaact ccatctctac aaaaaatttt |
| 211441 | aataattagc ccaggcacag tggctcactc ctgtaatccc agcactttgg gaggctgagg |
| 211501 | caggcagatg acttgagacc aggagttcaa gaccagMctg gacaacatga Kgaaacccca |
| 211561 | tctctaccaa aaatacaaaa attagccgag tgtggtggca catatgtttg taatcccagc |
| 211621 | tgcttgggag gctgaggcat gaaaatcgct tgaacctgRg acgcagaggt tgcagtgagc |
| 211681 | tgtgatcacg ccactgtact ccagcctggg caacagagtg aaactctatc tcaaaaaaaa |
| 211741 | aaaaaaaaaa ttagcgKgcg tggtggcatg cacactactt gggaggctga ggtgggaggc |
| 211801 | agagcctggg aggcagagtc Wgcagtgagc tgaggtcaca ctactgcact ccagcttggg |
| 211861 | caacagagta ggactgtgtc tcaaaacaag aaaaaacaag tctggccatg gcggctcagt |
| 211921 | cctaiaatcc cagcacttaa caaggtagag gcaggaggat agcttaagcc caggagtcca |
| 211981 | agacctgcct gggcaacata gcaagacccc attctccacc aacaaaaggg acaaaaaaga |
| 212041 | atttttatta ctgaccttgt ttctagcaag aaacaatcta ggataagcca ctaggttgag |
| 212101 | taaacgctgg catcaatatg atgaactatc gaatattgtc catggtacaa acttaataaa |
| 212161 | tatttctcaa atatactcaa cgtatacact atataagaac cttagaaagg agtgagatgt |
| 212221 | gtagatgact tacacNNatg ggtagagaaa cacataaaca aattgtttca ttgcagcaaa |
| 212281 | tattggaaat catctaaatg ttcatcaaga gaggtgaaat taggccgagt gtacttgctc |
| 212341 | atgcctgtaa tcccagagct ttgggagacc aaggcaggag gactgcttga ggccaggagt |
| 212401 | tcaagactag actgagtaac atggcgagag ctcatctcca cNaaNttttt ttttNaatta |
| 212461 | gccaggcact gtcgtgtgta cctgtagtcc tagctactca gaaggctaaa gtcagaggat |
| 212521 | cacttgagcc caggagttca aggctgcagt aagctatgac acgccactgc actccagcct |
| 212581 | gggtgacaga gtgagatctt gtattgaaaa aaagaggtga aattaaataa atcatggtat |
| 212641 | gtccacacaa tgaaatgcta tgcatctgtt aaaaacaggc cagatctaat ctatgtccta |
| 212701 | ggctgggcgc agtggcttgt aatcccagcR ctttgggagg ccaagRtggg tggatcacct |
| 212761 | gagatcagga gttcaagatc agcctggcca acatggtgaa accccatctc tactaaaaaa |
| 212821 | tacaaaaaaa ttagcYgggc gtggtagcac atgcctgtaa tcccagctac tcgggaggct |
| 212881 | gaggtRggag gatcacttga acctggaagc cagtggaggt tgtggtgagc caagattgct |
| 212941 | ccactgcatt ccagcctggg caacaagagt gaaactccat ctcaaaaaaa taaaataaaa |
| 213001 | taatctatgt cctagattgt taaaaaaWWt ttaaaggtgc agaacagggc acttggaatg |
| 213061 | ctactatttg aagggagaaa aaaataaaag gacaSataaa tatttatgtt tatataacat |
| 213121 | caccagaaag atacagaaga aaaaacaaaa caggtaagtc tatactgaaa gactagggtc |
| 213181 | tgaggatgtg aaaacagggg tgacagagac ttagatttac tttttgctct caattacttt |
| 213241 | ctgtagtgtt taaatttttt accatataca ggtttttctt tttcaaaaaa acaccaccaa |
| 213301 | aaacaaaaac acagattttt ttttagaagg aaggggagtg ttatggattg agtttcttag |
| 213361 | aaggaaggag agtattatga gttgagtttt ttagaaggaa agagagtgtt atacgttgca |
| 213421 | ttatatcccc tttatatgtt gaagtcctaa cccccctaca ggttgaacat cccaaattca |
| 213481 | caaatctgaa atgcaaaatc ctccaaaatc caaaactttt tgagcatcaa catgactcat |
| 213541 | gaagatctca cccaatttcc cagaagccct cgctcccatc ggactagaat cttcttttga |
| 213601 | gaggcctttc cttttctcat ccctattgca accagtacaa aaagcaaaac agaaagacac |
| 213661 | taaagcaaaa ccaaagtttt agtcacaaaa accaaatggg ttggcgaggg aaggtggtgg |
| 213721 | ttacagggaa ggttttaagc tcaccaggcc ctgtagctga ggtttcaaaa tggcagctag |
| 213781 | ctggacgcca tctggtctaa atctgctcac ccaaacctcc ctccagttct ccaagggatg |
| 213841 | tccctaatta ctagcacagc cagctgccaa catggaatct aggtctccct tctttcaaat |
| 213901 | attagagatg tgagaccaga aagattactt cccaatacca gagaaaaggc tacgagggag |
| 213961 | gaacaaggga gagaaggaga ccttcactgc agcatgcaag gacatggcgg acgcgtccca |
| 214021 | tcccatatct cagctattat gcattcccaa ctggcttggc caacatccag agagactcca |
| 214081 | ggctggtgag tctgtgaatg tgaagtagag ataagcaagg cggcgagggg gagctcgccc |
| 214141 | actgttatat acgggctgca gcattgcgtg gcgaggagtc aggggaatct tccatttcca |
| 214201 | agacatttct gcactcgatc ctgctcccca agactaagaa ttctttMttg gcttcctccc |
| 214261 | actccctgga atgtaactaa gcagttacct tgagaacaag gaaaaattgg gggctaggga |
| 214321 | ggtgtatgag tgttttaatg tgttaaaaat cacatttacc ctggatactt gtttgcaata |
| 214381 | aaacagagag taggaaactc cattcttacc ttcatctatg ggacaggcac ccagtggcaa |
| 214441 | tcattgtgag aaatagggag aggctgatct atgcttaggg agctcagaaa atgctatgct |
| 214501 | tccttccagc tgtagggaag ctgagccact ggggaagagt ggatgcattt ggacaaacag |
| 214561 | gaatggatgg aaggctttct aggagagggg accacatgag caaagcctga agaaggggtg |
| 214621 | gttcttatct agcaatgagg aagtgtgagg agaggcaaag aaatatcttc tagaagctga |
| 214681 | gggatcaggc actggaagct tatctacctt ctccaactcc agggtaccac caaggagagc |
| 214741 | aaaatccaga aacaaggggc acctgcaaag tggtggagga aagaggagga aaggaatgtc |
| 214801 | tgccccRagc ccagccccag ggtcagatgc cgggaaaaat tcctgggatt atttggtgct |
| 214861 | gtatgagatg gatctggagc caccctggct ccaagaggga tgtgggtttg gactggggct |
| 214921 | Kccaggactg gtctggggca agctaaggac actttcacgt gtccacactt ttgtacttgc |
| 214981 | tgttcaccag tatctccttt ccccccftct cctccctgtt catggaaatc cttaaaaatc |
| 215041 | atctcctctg ggaagttctc ctgatgctct cattcagaat taacccacca ttctttatgt |
| 215101 | cgcttcaaca agttgcttgt atctcttttt ccatttacgt tttctttttc tttttttttt |
| 215161 | ttNgtttgtt tgtttgtttg ttttgagaca gagtctcact ctatcgccca ggctggagtg |
| 215221 | taatagcgcc atcttggctc actgcaacct ctgcctcccg ggttcagttc aagccctgct |
| 215281 | cctcctcagt ctcccaagtg gctgggatta caggcacctg ccatcacccc tggctaattt |
| 215341 | ttgtattttt agtagagatg gggtttcacc atgttggcca ggctggtctc gaactcccga |
| 215401 | gctcaRgtga tccgcctact tcagcctccc aaagtgctgg gattacaggc gtgagctacc |
| 215461 | acgaccagcc tacgctttcc tatatgcctt tttttttatt ttttgagatg gagtctcact |
| 215521 | ctgttgccca ggttggagtg cagtggctca atcttggctc actgaaacct ccacctcccg |
| 215581 | gattcaagcg attctcttgc ctcaacctcc caagtagctg agactacagg cgcatgccac |
| 215641 | catgcccaac taatttttgt atttttagta aagatggggt ttcaccatgt cggccaggct |
| 215701 | ggtcttgaag tcctgacctt aggtgatcca cctgtctcag cctcccaaag ttctgggatt |
| 215761 | acaggcatgg gccaccgtgc ccagcctatg ccttgtctta taattagtct ccctctcttc |
| 215821 | taaatgtaaa ctctcagatg tcaagaacta gatcttatac atctttctga ccccatcccc |
| 215881 | cagcaccagc tcttccccag agcagacact cagtaaatac ttattgaatt gaatatacag |
| 215941 | acccacaagg agcaacctgg tactggcgga catttttgat tcctgcatcc attcattcat |
| 216001 | ttgctcaaca accatgtgag tgcctaatac ctgccaacct ggctcacact ctctcacaga |
| 216061 | gcacactcRa attgtttcat caaccagcta aaagtaagtt cagtatcaat tcagggcttc |
| 216121 | ttttcagttc tagaacatag aaaatttcac aggatcacct gaacaccgca gggcgggtgc |
| 216181 | agcctacatc ccattgcctg tttctgtcca gatggaaagt cacaccctca agaaggcccc |
| 216241 | tggggaagac agattgtctg ggatgtggat gagggccccc acaggctctg cccagcccag |
| 216301 | cccagcccag cccagcccag cccacccagg ggaaccctag atacacctat cacaggagat |
| 216361 | ggcagttaag ataactctat ctacatacac agtaccctgt ggatactaag taaggagctg |
| 216421 | gtcatttgga atgaggcagg agagctctag gaagtcctct ctgcagagta gatgtggcca |
| 216481 | tggaggtggg aggattaact gaaggtcata agaaaagtct gcccttctca gagatcaata |
| 216541 | agtgcaaatt acttgagagt ccaggaactg ctctgccatg gaggaaaaat acagatgggg |
| 216601 | gcaggggcgg gaaaggaagg gggcaggtta gggacagtca ttgatctcgg cgggctcttc |
| 216661 | caagtctaaa attgtaggat tctaacctga acctcccctg ccaacaactt gaaagagttg |
| 216721 | tcttgagatc agggacatgt ggagagaaag ttgaatagca tgtcagataa taaaccaaga |
| 216781 | agaaattgtg aagtcaaaac aagggataaa ttttccttat ctctctaaga catgcatcaa |
| 216841 | agcagctgRc tgctgtctgc ctggcctggg aagatgataa tggtttttaa tggcccgtaa |
| 216901 | acaataggac cagcctttgt aataaagttt aaccaattaa tcctctaggc ttcctccctg |
| 216961 | cactctgcct actctccgct cctcctttct gtgatggggc aaccttcagg ggtctgaaaa |
| 217021 | gcaagggatc cagcccctag acgcaaacct ataggtgaca ataagagttg cccagaggaa |
| 217081 | gtgctaaaga aaattgcctc tatcctgatc tggctaaaag gaggaagaaK ccctcttttc |
| 217141 | agSgaaaagg agaggagaga tgatgcatca aggaatttgc acaagaggta aacttcattc |
| 217201 | ttattcagga gctcattcat tcattcagca aacattcatg aacacctact atgtgcaagg |
| 217261 | catctgcaga gggtgcaaaa atatacaaag aaaatacctg cccaagatgg aattaaagcc |
| 217321 | tggagggggt ggtactggga acaagacaca ttcacagatg gccgggcgcg gtggctcacg |
| 217381 | cctgtagttc cagcactttg ggaggcagac gtgggtggat cacgaagtca tgagatcaag |
| 217441 | accatcctgg caaagatggt gaaaccccgt ctctattaaa aatacaaaaa attagctggg |
| 217501 | catggtggcg cgtgcctgta gtcccagcta ctcgggaggc tgaggcagga gaatcgcttg |
| 217561 | aaactggaag gtggaggttg cagtgagcca agattgtgcc actgcactcc agcctgggca |
| 217621 | acaagagcga aactccatct caaaaaaaaa aaaaaaNgac acattcacag atatcaatcg |
| 217681 | taaaagttag tacaatagcc tctgcaaacc actgtataag tccaNcttct ttttccattt |
| 217741 | cttctttcat gtgccatgtt ccgcttgggg tggttacgac agacaatatt cagaaaatgg |
| 217801 | aagaatcaga aagagaagaa agtggaacac acaagagaaa gaaaaccaag gccctcctcc |
| 217861 | ctcctgccat ggccctctct gtcttcagcc ctagttctgg aaaagaaaag ggtgtgttgt |
| 217921 | cactagaggc ctccaggcag gtccatgcca ctgagtcaca tttcaagctg tgtttgcttc |
| 217981 | ctacaccaac aaggcatatc ttttctgaat tgtgcaatat tctggccacc tgggtttttc |
| 218041 | tacttggtat accaactcct agtactcaac aaccattccc tttactcttt tttttttttt |
| 218101 | tttttttttt tttttgagac agagtctcac tctgcacaat ctcggctcac tgcaacctcc |
| 218161 | gcctcccaag ttcaagcgat tctccctgtc tcagcctccc aagtagctgg gactacaggt |
| 218221 | gcccaccgcc atgcccagct aatttctttt ttacttttag tagagacagg gcttctccat |
| 218281 | gttggccagg ctggtctcaa actcctgacc tcaggtgatc tgcctgcctc agcctcccaa |
| 218341 | agtgctggga ttacaggtgt gagccactgc gcctggcccc cctttactct taaatacagt |
| 218401 | gtgtgccagc tgtagtagtt tatgcctgta ctccRagcat ctcaggaggc tgaggcagga |
| 218461 | ggatcacttg agcccaagag ctttaggctg tagtaagcca aggtcacacc actgcattct |
| 218521 | agcctgggca acagagcaag accctgactc ttaaaaaaaa atacaatgtg taatggtgat |
| 218581 | ataataattc aaaggttaat catctctact tttgaaaaca ataatgaata ccttgctttg |
| 218641 | catttgttta gcctcacatt tttttcagag ttcttcaaaa aatattatct catgttcatg |
| 218701 | ctacaagcaa ccttggRtgg taacaaaggt taaacatcat tatttccact ttaaattttc |
| 218761 | cctcctttct ccatttgttt tctactcaac aaacagtggt tgagtacctg cYatgtgcta |
| 218821 | agcacYatgc tgggtacagg gtcatgcaac atagcagaaa aacagcagat cMtgccttca |
| 218881 | acaggttcaY agagctatgg ggaggagaag tgaggacgtg gtccctgtct ccagggtctg |
| 218941 | gggSatcttc tagaggagaa gattgagaca agcattaaaa gattatcatg ggccaggtgt |
| 219001 | ggtgctcaca cctataatct caacactttg ggaggccaag gcaagaggat cgcttgagcc |
| 219061 | tgggaggtgg aggctgcagt gagccatgat ggtgccactg cactgcagcc tgggcaacaa |
| 219121 | agtgagacca tgtcttaaaa aaaaaaaaaa acttaatatg attttaccag gtagaaaaga |
| 219181 | gaggaaaggg gattccagag agtgggccag caatctatgc acagagaaRa gtgagccatc |
| 219241 | tggggcatcc agaccatggg gtgaggagca atgaagggca aaggctgaga aagactgaaR |
| 219301 | agggaggctg ggcccaaaca acggagccaa gagtgccttg ccaaggagtt tggactttat |
| 219361 | cctgggggca atgaggaaat cactgaaggt tttaagcaga ggtgggtgac gtgatcagat |
| 219421 | ttgtgtttca gcaagattac cctggccacg ggatggagaa agcactggac tgggaagaga |
| 219481 | ctgggcagac tctagaaaca ttcccaaaat agaattcgca ggactgggtg tcccactgga |
| 219541 | gataggagga aaaggagata atagaaacag ccttctcact tgggcttgag gggccctcgt |
| 219601 | ccaatatagg agaccagtaa gaaagccttg cccaaggtca cctcaagtta cttgatggct |
| 219661 | aactcgaatc aagaagctca agttccttct ggtagaaacc tcttagtctg cctcattcac |
| 219721 | attgatcagc aaataaattt aaccatcatc tgccagRctt tccttgtttt ccactttata |
| 219781 | catgtgcact ttttgtccta tggagattat taagatcatt agggcaaaat tccttttgac |
| 219841 | ctcccataag gcctctcaca gtacaagaca atatgtggtc aataaatatt tgttattaaa |
| 219901 | tcaaactcca ggagccccaa gaacccatca ccaggcattg ccttacttac aacatgagat |
| 219961 | atttgccttc tttaatccct aataaacagt tttttgtttt tgagacagag tcttgctctg |
| 220021 | ttgcccaggc tggagtgcag tggcacggtc tcggctcact gcaacctctg cctcccaggt |
| 220081 | tcaagtgatt ctcctgcctc agcctcccaa gtagctggga ttacaggtgc ccaccaccac |
| 220141 | gcccagctaa ttttttgtat ttttagtaga gacagggttt caccatgttg gccaagctgg |
| 220201 | tctcaaactc ctgaccttgt gatctgcctg cctcagcctc ccaaagtgct gggattacag |
| 220261 | acgtgagcca ctgcatctgg ccaacagtat tttttattta attcctagat aaagtaattc |
| 220321 | ctagatgctt gaatttcaca atccaagata attttttttt gagacagagt ctcgctctgt |
| 220381 | cacccaggct ggagtgcagt ggcgtgatct ctgctcattg caacctcacc tcccaggttc |
| 220441 | aagtgattct cctgcctcag cctcccaagt agctgggatt acaggcgcct gctaccacac |
| 220501 | ccagctaact tttttgtatt ttttagtaga gaYggggttt caccatgttg accaggctgg |
| 220561 | tttcaaactc ctgatctcaa gtgatccgcc cacctcggct tcccaaagtg ttaggattac |
| 220621 | aggcgtgagc caccatgccc agccacagtc caagatattt ctaacaacaa caacaaaatt |
| 220681 | ggagcgttca atgtggtctt gccaactttt gttttaacac cattgtttct taaaagaaag |
| 220741 | aacattgaat acatatcccc aaagtcagga taatataatt ttaagatgaa ttttccaaat |
| 220801 | taaatcagag ttcctcaacc tcagaccaat taacactgga ctgaagaatt ctttgctatg |
| 220861 | gcagtggagg ggaaggagaa gggggagctg tgggcaaaat tgcaccagtt cagaaccact |
| 220921 | gaatttttta aagtacgctt tcttaaaaat ccagttacac tgtccttata ttttggatca |
| 220981 | gtgaaaacta tcacagactg ccaccagtcc ataaacagct tttgggaaca agagactcag |
| 221041 | aggtgaagaa tgtggaattt gaaatcagac ttgaactcaa atcccagttc cacctctcct |
| 221101 | cattccctga ccttgagcaa ggcactgttc caagcctccc tttcctcccc tgcacagcga |
| 221161 | ggacaatacc accccatccc agttgtgggg aggattcaat ggaatagatg tgacgcactt |
| 221221 | agcatgtgac catcgggaac ggaagtatga cattattaac attatttcta ccacttctat |
| 221281 | aacatatgtg gtatctaata caaattaatg actgctaccc aaatttcaga ctttctgggt |
| 221341 | caaaaggacc ttacacataa tatagtggac tttcaataaa cacttaccaa atggacaaat |
| 221401 | gaaccccttg tcaccccgat ctcactagtt ccttccctga aacccgacac atctgagtcc |
| 221461 | ttttctcctt tactaaccct ttctccaatc ctgctcatgg gaattaaagc tgtaaaataa |
| 221521 | gcctggcgca cctYgggcct ctgccctggg ctctgtgggt gggagcactg tggaagccgt |
| 221581 | atcaatcgcc cccacctatg agagcctttc ttcagggcca gccatgaacg tYccccatgt |
| 221641 | catcagcatc ttcaggctac tgctgtcctt cttggatatt taacctggag gcgggccagg |
| 221701 | gacagaaaaa ggaggtggca agatccttga acaaaaggag ctataaaagg gcgttggggg |
| 221761 | aagcaaggca aacggcagat taaacaagca ggcacctcaa ggaaacgtga cgcgggaggg |
| 221821 | gattccgagc ctctctgtct gcttacttga cagcaagcag gtcagagttc ctgccatttc |
| 221881 | cttctagtag aaaccccacc aagaccacct ccccgccttg gcaggcaaag cactggtagc |
| 221941 | tctcccaagg gaaaaaaaaa acaaaaaaca cacactcctt gttacaaacc agacacagtc |
| 222001 | ctggacagag cccagctaac aataaatttc tggggttcat ctcacaagta cattaagtat |
| 222061 | cttctgacaa tctcccaaag ggctgggttt ttctggccat cacagggctg tagaatattg |
| 222121 | agtacaagga gagggcttca agaacagggg atccaagccc tcgtttcatt gatggggaaa |
| 222181 | ctgaggctca gagaggggga aggaacttgt tcaggatcat ccaagtatgc tccYgtcagt |
| 222241 | Rgcagcactg agccaagaac tcaaggcttc agttttggca ctgggttttg ccagaggctt |
| 222301 | gaaaacatac caagaagtgg aaggtgtact atgagctaaa tctcactttt cctgaaaata |
| 222361 | tagatgtgtg ctcacacagg cacacatgtg cataaaaggt agggaaagag gaaaacaaat |
| 222421 | gtagcaaaat gctagtaaat ggtgaatcta agcaaagRgg atattggtgt tcattgctct |
| 222481 | attttcacaa cttttcagaa ggcttgccat ttttccaaga aaaatctgag gaagggctag |
| 222541 | gtgtggtggc tcatgcctgt aatcccagca ctttgggaag ccaaggtggg aggatcgctt |
| 222601 | gaggtcaaga atttgagacc agcctgggca acataacaag accccatctc aacaaaaaaa |
| 222661 | ttaaaaattg ccaggcatgg tggctcacac ctgtagtccc agctactcag taggctgaag |
| 222721 | caggaggatc gcttKagccc aggagttcRa ggctgcaatg agctatgatt gcactactgc |
| 222781 | actctagcct gggcaacaga gtaagaccat gtttctttaa aaaaaattaa aattaaaaaa |
| 222841 | taaaaaattt tgagggagaa agataaagca ctaactagca atctaagata aaaaattttt |
| 222901 | ttaaaaaaat cacttggaaa agagtaggaa ttcctccttc aatttcattc agtttcccta |
| 222961 | gctagggact aatatcctta gaaaaagtta taagaaatcc agaggttaaa ggggtgggac |
| 223021 | tccaaacaag taagagatcg ccagtattca tagcagtccg cagctacagc aatcttagaa |
| 223081 | tccaaatacg atttcagata ttttgtccca tcagctccta aaatacatat attctggtca |
| 223141 | caccatgtat cctctgttgt ttttggtgca aaaagtaaag taaccaYgaa ctacagatag |
| 223201 | ggcaaatgtc agaatttttc caggggactt tatcaccttt gcaatacagg tagtttataa |
| 223261 | atgcaataca atatagttta atttctattc aatttgcaaa ttctttcaca tgagtaaatc |
| 223321 | atttaatcaa aatccacatc caacccacac tcaccatgtt ctctatccat attagtattt |
| 223381 | ggtttgggcc atactgggtc cataatccag ccctgaaaat ctatcctggg ccacatatat |
| 223441 | aactcatacc aatagcaggg cactcaaggc atgaagattt gagggaacac aacctatcca |
| 223501 | agaaacctca aggaattcct tatggctgaa gtaaggtctg aggaaaccat gagcagggga |
| 223561 | atatgacttg gagagaaggt agaggttaaa tccaggaggg ctcatacacc caacaaagga |
| 223621 | gttggaagtt tatccttcag aaaacaagga gtcactgaag ggttttaagt aggcagtgat |
| 223681 | ataattggat cattctggca gagtacagat ggatgaaagt aactcaaagc taggaagact |
| 223741 | atcggaatga caaagacctg aactaaggca gtctgagcgg gagtgaactg ataacacatt |
| 223801 | aggaagagct attgaccaca gcaaatggac aaaactgggt gggaagaggg cagatgtgtc |
| 223861 | tgagagagac agaaaggatc ccagatgacg tctagcttgg ccaactaggt agacgatgac |
| 223921 | aacactcacc ctgacgggga atccgggagg aggcgaaggc ttggcagagg aacgtggtga |
| 223981 | gttttgaacg tgttgaggtc ctggttggat atacaaatat ggagctccag aaagaagccc |
| 224041 | aggatgaata tgtgcattgg gagtaaccaa cattaatgta cggggatgga tgccaagggt |
| 224101 | gcagaggagg tcagccagag aattgggggc aaaacaagaa ctgagtcaag gacagaaact |
| 224161 | ctgggggaaa aaaaaaattt aagggcagtc agggaagaag agaccccaaa aaacgttgag |
| 224221 | gagtagccaa agaggtaaag acctaggcct gcttttaagt gacccactaa actcctccat |
| 224281 | ctccacaggc tggtcacacc atgctggggc tggggaagga ataatcatgt gttaaaataa |
| 224341 | actcatttct caatgaaaag acaaacagcc caatttaaaa atgggcaaat aacaaataga |
| 224401 | catttctcca cagaaaacat acaaatggcc aatagacaca tgaaaacata ggaagtatca |
| 224461 | ttcggtcatt agggaaatgc aaatcaaaac cacaatgagg ccgggcatgg aagctcacgc |
| 224521 | ctgtaatccc agcactttgg gaggtcgagg caggtggatc acttgaggcc aggagttcga |
| 224581 | aaccagcctg gctaacatgg tgaaactcct tctctactaa aaatacaaaa attagccagg |
| 224641 | tgtgctggtg cacgcctgta atcccagctg ctcaagaggc tgaggcacga gaattgaacc |
| 224701 | tgggaggaga aggttgccgt gagccgagac tgcgccattg cactccagcc cgagtgacag |
| 224761 | agtgagactc tgtctcaaaa caaacaaaca aataaacaaa aaacccacaa tgaggccagg |
| 224821 | catggagtct gacgcctgta acgccaacac tttgggaggc caaggcgggt ggattacttg |
| 224881 | aggtcaggag tttgagacca gcctggccaa tatggtgaaa tcccatctct actaaaaata |
| 224941 | caaaaattag ctgggcatgg tggcaggcat ctgtaatccc agctattcgg gaggctgagg |
| 225001 | caagagaatc acttgaaccg gggaggcaga ggttgcagtg agccgagatc gtgccactgt |
| 225061 | actccagcct gggtaacaga gtgagactgt ctcaaaaaaa aaaaaaaaaa aaaaatcaga |
| 225121 | taccacttca cacctggtgg gatggctaga gtcacaaaga ggtagaggaa ctggaccccc |
| 225181 | catacatcac tgattggaac acaaaatgcc acagtcactg tggaaaacag cttggcagtt |
| 225241 | cctcaaaact tcaaacacag agttattata tgacccagaa actcctcccc taggtatata |
| 225301 | cccaaaagaa ttgaaagcat atgtccacgc caagacttgt acatgaaagt ttgtgttagc |
| 225361 | attcttcata acagccaaaa agcagagata aagcaaatgt ccatcaacag atgaataggt |
| 225421 | aaatcaaatg tggcgtattc atacaaggga ctattattca gccataaaaa ggaagggagt |
| 225481 | actgaaacat gcaacaacat ggctgaacgc tgaaaacatt atgctgagtg acagaagcca |
| 225541 | gatacaaagg ccacatgtgt tatatgattt catctctatg gaatatctag aatagggaaa |
| 225601 | tccaaggaga caaaaagcag attagtggtt accaggggta gaggggacag gggagtgggg |
| 225661 | agtgtctgct tcctgagtgc agaatttctt ttttcttttt ctgtcaccca ggctggagtg |
| 225721 | cagtggtata gtctaggctc actgcaacca ccgcctcccg ggttcaagca attctcctgc |
| 225781 | ctcagcgtcc tgagtagctg ggattacagg tgcacgccac catgccccgc taatgtttgt |
| 225841 | atttttagta gagacgggat ttcaccgtgt tggccaggct ggtctcaaac ccctgacctc |
| 225901 | gtgatcctcc ctcctcggcc tcccaaagtg ctggaattac aggcatgagg ccaccatgcc |
| 225961 | aggccaggat ttctttgtag ggtgatgaaa atgttccggc atcagatgtg gatgatggcg |
| 226021 | gatgtactaa ccaccactga attacgcact ttcaaatggt tagaatggtg aattttatgt |
| 226081 | tgtgtgaatt ttctctcaac agaaaaattc aatcatcctt tacaaagtga cccacagcca |
| 226141 | caaggagctg gggaagcagt ttctccagct tgcagcagga gctccagata ttctgagtaa |
| 226201 | agaagccaaa cagcctgctt cccgggagac ccttaaatgt cttcacacat ccacagctgg |
| 226261 | gggaggagac gctgatgaac aggagaagat ggagcatcgg cctcccctgg ctactcactc |
| 226321 | tgtgctcggg ccgcctcgcc cacttgtaaa accccaaatg ccagggtggc agcaaggcat |
| 226381 | acatgcaact atgacttgac ccgcagcgag gcagcaacca ggtctcacct gggcatagtt |
| 226441 | accccacaag gacaggaaag gagaaatggt ttccaggccc aggacaccca gaagccacca |
| 226501 | aaaaccaacc tcatggttca tcccccttat ttgactcttc gacacctaaa acctgtgcgt |
| 226561 | tgtgttcaag atacacccgc cggagaccac attcccagac atcccgaggg ccagccgtca |
| 226621 | ccacaSgggt gcctcgggga gatgctggag acacaagtgg ctttgaaatt agcacaactt |
| 226681 | acatggcctc caggtctgct gtggaaatcc aggtccaaag aagaagccag tgaggaacag |
| 226741 | gaggctgatc attgtgttct cagaaggggt tggagcctct ggggaggggg cactgaggac |
| 226801 | agagcacggt gttctgcaga tcatatcaca tctctacttc cctctccagt gatatgcttc |
| 226861 | cctcRctctc ccattttgct ccctctctcc tgccaaactc ccagggcaac cctggataat |
| 226921 | aaagtgaccg aatgtgaatg cttccaggtg gcacaccagc actccagaga aactgtcaga |
| 226981 | gcagggggca aacccctggc ctactccagc cactggataa gcgcaccctc ctccatgcct |
| 227041 | ccctgctcct gcctgccctg aagggagaag gagcgcaatg aaactaggtc ttcccttggg |
| 227101 | gttctgacca cctcgtgggg agattatgat tgccctgtgg ttgccatgcc tactgtgatg |
| 227161 | tcactccttt tatcagtcta tctggatgaa tttttccccc ttttctctga aggaaacctc |
| 227221 | ctacccagtg cttaggagcc cattgggagc tcccgccctt gtcttatctc gatctgggac |
| 227281 | ctcagaagac tccacattcc taacaggact agctctcagg atgaagaaaa tctctctcaa |
| 227341 | gctggtcaat ctactcctag atttaagcag aaccaaacag aacctatttc aacatcccct |
| 227401 | ctcagaatgc aaacaggaga cggctgtgtg gaaagatcca atcaccttta cttaattggt |
| 227461 | cagaataaaa tcactttttt ctttttaagg cagagtttcc ttctgtggcc cacactggag |
| 227521 | tgcactggcg caatctcagc tcactgcMac ctccacctcc caggttcaag caattctcct |
| 227581 | gcctcagcct cctgagtagc tggaattaca ggcgcgcacc accacacctg gctaattttt |
| 227641 | gtgtttttta gtagagacag ggtttcacca tgttggccag actggtctcR aattcctgac |
| 227701 | ctcaagtgat ccacccgtct cggccaccca aagtgctggg attacaggca tgaaccacca |
| 227761 | cacctggcca gaatcacttt ttcagtaaaa taagtgcaaa gaagaatgag ggtgKgggaa |
| 227821 | aggtttactg atcccacact ttgtcatgca cagaggaagg caaagaaaga aagaaaactc |
| 227881 | tttcctaaat gatcacttgt ctccagcagg tgtatcttga ccattccagc catggatcta |
| 227941 | tagggagttt catgccaatg aaaagcattt ttttggggtc ctactatgca tcaggcactg |
| 228001 | tggcaggtac tggagactta gtcccagccc ttaaagaact aataatagga tcatggccag |
| 228061 | gcgtggtggc tcacgcctgt aatcccagca ctttgggaag ccgaggcggg tggatcatca |
| 228121 | gaggtcagga gttcgagacc agcctggcca acatggtgaa accccatctc tactaaaaat |
| 228181 | acaaaaatta gctgggcgca gtggcagtca cctgtaatcc cagctacttg ggaggctgag |
| 228241 | gcagaagaat cgcttgaacc tgggaggcag aggttgcagt gagccaagat tgtgccattg |
| 228301 | cactccagcc tgggagacag agcaagactc catctcgaaa aaataaaaaa agaaaagaaa |
| 228361 | gaaaaaaaag atcactgttc acaatcacaa catttacaca gcctccttca aaagaatttc |
| 228421 | ttctctagaa agataagctg agagaccaga cagttYgtct gcggccttca tgaagtgaaa |
| 228481 | ggaggcagag aagaaaggag ttggccatgg acaggttttg ccccagatcc ttgagtgaag |
| 228541 | accccagcct gctgcaagct ttttcctcat tctgtcctcc cctcctggaa tctgtggcag |
| 228601 | cttccacagg cggtgaaaga aggcagcaag cagtggctcc agtgccagct gcagcaacca |
| 228661 | caccagggga atggggccat ctgacacaga gagggtgtga gggccaggga gactgtccct |
| 228721 | gtagccagct aacccctcca gtcaagtcga ctttcacaaa atgggcctgc tcctggaagt |
| 228781 | cattgatgcc attgttaaaa cacagcacca ggccgggcac ggtggctcac gcctgtaatt |
| 228841 | ccagcactct gggaggccga gacgggcaga tcacttgagg tcaggagttc gagaccagcc |
| 228901 | tggccaacat ggtgaaactt tgtctctact aaaaatacaa aaattagctg ggcgtggtgg |
| 228961 | tgcacacctg taatctcagc tgttcagaag gctgaggcag gagaatcact taaacccagg |
| 229021 | aggcRgaggt tgccatgagt cgagatcgag ccactgcact cctgcctggg caacagagtg |
| 229081 | agacYctgtc tccaaaaaac agcaccctgg agaagacagc agtccattca cactggaaac |
| 229141 | atccagactt attacataaa aatggcaatt agtggccagg cacagtaact cacgcctgta |
| 229201 | atcccagcac tttgggaggc cgaggtggcg gtgtaatccc agctactcgg gaggctgagg |
| 229261 | caggagaatc gcttgaaccc aggaggtgaa ggttgcagtg agctgaaatc acaccactgc |
| 229321 | acttcatcct ggatgacaga acgagactcc gtctcaaaaa aaaaaaaggc aattactgtt |
| 229381 | ggcatcagca gcacagttgt tttcagccaa aacttaagac acagaactag ccttatcttt |
| 229441 | ccagtatatg gtatgtctct tgctattttt tgcaaattat ctatcatata tattatcata |
| 229501 | tatattcttt tttttttttt tttttttttt ttttttttgg agacagaatc tcgctgttgc |
| 229561 | ccaggctgga gttcagtggc atgatctcgg ctcactgcaa actctgcctc ccgggctcaa |
| 229621 | gcaatttttg cacctcagtc ccctgagtag ctgggattac aggagcacgc caccacaccc |
| 229681 | agctaatttt tgtattttta gtagagacgg ggcttcgcca tgttggccag gctggtctca |
| 229741 | aactcttggc ctcaagtgat ccatctgcct cagcctccca aagagctggg attacaggtg |
| 229801 | tgagccaccg catctggcca tatatattct tttaatggca agcgggaaca aaatcgtatt |
| 229861 | cccattttct gaatgagaaa accaagccta aaagagggac tcccaagtaa tatcaacttg |
| 229921 | caaacctatg aatttttatc ttaaatactg gctttgaggg acctttggca acagcaaagg |
| 229981 | cattcggcaa tttgtgtgga agtcacatta ccagcccacc gaataagcca caactatgag |
| 230041 | ttcttccgtg attagcgggg ctggggatgt ggcaggcagg cgtggaagtg agatccacgt |
| 230101 | gaaagaccta agcactgact ccccgaggga ctggcgaaat gacgcagggg ccagatagat |
| 230161 | gtcagatttg gccaaagtgt cctcctttct cacaagcccg tctgcctttc acctgtcctg |
| 230221 | aggtaggaca accggatgcc ctactttgct gtgcagcccc actctcttgg ggacagtagc |
| 230281 | ccaaacaggc tgctcttgct acacacagat aagaagcttt gccacccaaa accaagaaag |
| 230341 | gggccggtga ggacacacag ggaatgctca ctcagtggtg gctgagtttg tggaagtagc |
| 230401 | aaaacctgca ctgtaggacc cacacctgtg agagagggcc ccacgggaat ctcagcttgg |
| 230461 | atcaaagcag gcgggtgctc actccactga gggcagcaga gcccagctcc aggtgcgatc |
| 230521 | aggaagtgac ctgagaagct ggagttctgg actcacagac ccaggcttga atttcagcac |
| 230581 | cactcagtca ctgtgtggtc ttgagtgact tgcccttgtt tttcctcatc cataaaatag |
| 230641 | ggataaaaat acctgacctt gaaaaattat acgaatgcca gcacacagta catacgcaca |
| 230701 | gcagagacag gagctagaat tattgatttg ccaaatgcag cagtgtctgg actcagccgc |
| 230761 | ccacttctga ccaatggcct tcacttgtaa cacagctgat ctggagggta aagcctgcag |
| 230821 | ccgtggaacc aagctctcgc caaggtaact gacccatgtg gggctcagag ccttgttctt |
| 230881 | actagaacca ctctagtttg tttgattttt tttatttatt tatacacata attctgtgca |
| 230941 | ttcctttatg catatgtata catatatatg catatgtata atttattcaa atagcatcat |
| 231001 | atcactgata ctattctcct acgccctacc ctcccacatg gctactcaca gcccctgcct |
| 231061 | ttccaggcgg cccgtgttaa catcttagtt tgtatccttc cacaattctc cccatattca |
| 231121 | tgtaatttta cacacacaca cactgaatag tgaagttttg gacagtgtgg gggcgttatt |
| 231181 | gtttaacaaa aatggaatta tacatcatac acagtctctc cctctttttt tattctacca |
| 231241 | taatttgcca aaatcctttt aatggttctg ttataattca tgatataaag gtgtcaaagc |
| 231301 | tattcagcca ttcctctact gatgggaatt cactcagttt caacttttgg ccactaccaa |
| 231361 | caaaaaagca ataaattcct tgacagtatg tcctaaccaa agaccatttt ccaaccagac |
| 231421 | aaaaggccag gtcccaggat gtgagggtca cccatgaaaa ggacctcatg atgaactcct |
| 231481 | gattcagcca catcatcctt aaaattctcc ttagaagaga gaccctctgc tcctagaaat |
| 231541 | acaaattccc aggcatgggt ctggcttcca aactctagct cctccagttc ttactgcatc |
| 231601 | aagtcaattc tgcaggtctt cattttccca tctgtaaaat aaaatcataa ctgccttagg |
| 231661 | cggcaggatt tgagagtgct ttagcaaggg atttttatga gggagcagtg tgtgaaataa |
| 231721 | tatttttgct gtaattctgt gagatgttgt ttctagNttg tNtgggggtc agggaaggga |
| 231781 | gggcaaaaca gaactaacag attcaattaa gttccctctg agactcaagg tccctattta |
| 231841 | taaggtacct ggggctggat gggaaggcac ttctatcttc tgcatttctg aaacacctgg |
| 231901 | tactgtggtt gtttacaagg aaaacttagg aactggacag gggagctttg gagtgtctac |
| 231961 | ttgcccagtt ttgtcagatt ccaaagaggg gcaactataa ttgaaattat aagaagaatg |
| 232021 | gtccaatcag caaattttgg aaaatctgta atctcactgg tgtttgattt tcactcaaaa |
| 232081 | attccctaag ctctacattt cattcagtaa aaagttgggg ttaggggaga gatggagaac |
| 232141 | ttcttttgca ggggtatagt gatttatttg gtctattctt gaaaaaaaat gagaaatttt |
| 232201 | gggaaaacaa tcttaaaatt tccatttcga gtagcagttc taaaagactt tcaagagcct |
| 232261 | ctctgaaaag aagcagttac agcaacttga atgaatttac ctggttatca tatggctcac |
| 232321 | atgcatgaga gtgggggaga agacacggta aaatcaacag agttcgtgtc atgatattct |
| 232381 | gctttaaaac ccaaatcaag gccaggcaca gtggcttatg cctataatcc cagcactttg |
| 232441 | ggaggccaag ataggatgac tgcttgaggc tgggagtttg agaccagcct ggaaaatatc |
| 232501 | atgagactcc tctctctaca aaagaaattt ttttgtaatt agctgggtgt ggtggtacac |
| 232561 | ctgtaatcct agctattcag gaggctgagg taggaggatc gcttgagccc aggaggtcaa |
| 232621 | gcctgcaagg agctatgatt ataccactgc actccagcct ggatgacaga gtgagaccct |
| 232681 | gtctctaaga aaaaaaaaaa aaaaacctca aaacctgact atagaaKaat tttcttcatc |
| 232741 | aaaatcgaat caagcagata attggcaccc ctttggaaaa ggattcagca gcctctactg |
| 232801 | aacatacgcc tgccccatga cccagtaact cccctgcaag gtgtatatac ttaaggtctc |
| 232861 | caaaagacaa gtaccagcat gttcccagca ccactactca tggaagaccc agaccaaaaa |
| 232921 | ctaccacatg ctcatcaaaa gtaaaatggg aaaaKaaatc atggtgaatt tacataacag |
| 232981 | agcactatat agcgatgaga atgaatgatc tacaaccaca gccaacgctg ggtgaatctc |
| 233041 | acaaacgcaa tgttaaaggg gaaatccagc tagtaaagtg aacgtgctag aagattccgt |
| 233101 | tcgatggggt tagactcaga atagtcaccc ttggtgggat ggggtaggga gcgttggggt |
| 233161 | gcctggaagg ggcacggcta ggcttctgtg atgtttcttc atctgggggt ttgtgacaca |
| 233221 | agcatgctca acttgtgaat tttgggtggt gaacatatgt gcactttttg gtatgtatgt |
| 233281 | tatacttcag tttttaaaac tKaagaaatt agccaatgaa caaaaataaa catgattgtg |
| 233341 | agctgggcat ggtggctcac actggtaatc ccagcacttt gggaggccga ggcaggcgga |
| 233401 | tcacgaggtc aggagtttaa gaccagcctg gccaacatgg cgaaaccctg tctctactaa |
| 233461 | aaatataaaa aattagccag gcgtggtggc agacgcttgt tatcccagct actcaggagg |
| 233521 | ctgaggcaag agaatcactt gaacccagga ggcagaggtt gcagtgagcc gagatcatac |
| 233581 | cactgcactc caacccgggt gacagtgtga gactccatct caaaaaaaWa aataaataaa |
| 233641 | taaacatgat taaggataaa gcaatccagY ggacaaggct cttggagcca tattttattt |
| 233701 | gKcatgtatc attcYgggga gctctcctct gtcaatgcca agactagcta gtcgagtgtg |
| 233761 | gagaaaaggc attctgtgag aacagatgaa agggaacaga gaaactggca ctttctttgg |
| 233821 | aaaagagttg tttccaaaac ctagatgtgc agcctctacc ccaggtaatt agtccaacac |
| 233881 | actatccatt acagctgagt ccgggtttgc ttcaaaagca tcgggggttt tttgggtttt |
| 233941 | gcttccctta aaaaaaaact tgttttgaat gaggggaaaa aggcgtagtt aatttttata |
| 234001 | cagaaatctg ttaaagagat ctgatcaatg gtgacaaaat ggaagccaga gatggaaaag |
| 234061 | attcactgtg aggctctggc actgaaggcc aacttgggct tccattcagt tcaataataa |
| 234121 | tatttatcat agctgctaac aatttttttc tcttttttga gatggagttt cactctggtt |
| 234181 | gcccaggctg gagtgcaatg gcgtgacctc ggctcactgc aacctccacc tcccgagttc |
| 234241 | aagtgattct ccggcctcag cctcctgagt agctgggatt acaggcatgt gccaccatgc |
| 234301 | ccagctaatt ttttattttt agtagagatg gggtttctcc atgttggtca ggctggtctc |
| 234361 | aaactcccaa cctcaggtga tccacccgcc tcagcctccc aaagtgctgg gattacaggc |
| 234421 | gtgagccacc acacccagcc aatagctgct aagacttacg caggtttaca tatgctaggc |
| 234481 | attgctctct gagcttatat atattaactc attccatctc tatctatgag gttgggattg |
| 234541 | atataatccc cactttacac ccagagaggg taataacttg cccaaagtca cacagctaat |
| 234601 | aagtgacaaa gctaggcagt ttggctagag tctgtgctct taacaattat accatattgt |
| 234661 | ttcctagtaa gcatttctta tgcccgtact atgtgctggg caccatgctg gacaaaagga |
| 234721 | gtactgagat atataaaaca cgggtacaca cataacaggt tctagtccat gcaatgatga |
| 234781 | gaatcataca ggcattctga ggtctaattt cagaacaaaa cgttagaaaa ctgcctccac |
| 234841 | acatctggac attaagacta aaatgcagtg cctgttttct cattggtatt attctattca |
| 234901 | atagagtcaa ttttaagact aagcattcct tgacacccca cccatccttg ggtcatgaaa |
| 234961 | ctcaataaag ctctcttcat tttgattgga ggggggaaaa ttccccgtaa atatgtttgc |
| 235021 | ttctttttcc tgaatcaccc tcttgtgtga aaaggattgc ttaccactga tctaacaggg |
| 235081 | tcttgaatac agggtccctc agagggtaca agaagcccag gtgttcaggt tattaaaaaa |
| 235141 | tgaagaaatg caaagcagga ttacaacatt tttggcacat tatagatcct cacacaacaa |
| 235201 | atttacattt tcacacacac tcacgcacaa acacacatac aaagtcaaat acacaatgta |
| 235261 | aaataattat gatcacaaga ggatgatagg ctctacattt ttaaatattg actcagaatg |
| 235321 | ccctgggaat gacgtggtca aggcacagac tgtgcatttg acactttgtg atgaacatct |
| 235381 | tggtgcacat ataatctagt gcacagataa tgtcaaagtc tcattagaat cctccatgga |
| 235441 | accaggtatg gtggctcata cctgtaaatc ccagtagttt gggaggtcaa ggccagacga |
| 235501 | tcacaaccag gagttcaaga ccagcctggg caacatagtg agtccctgac tctacaacaa |
| 235561 | atttaaaaat tagccaggcg tggtggcacc cgtctgtagt ttcagctact tgaggatcac |
| 235621 | ttgagcccag gaattggagg ctgcagtgag ctataatcgt gccactgcac tccagcctgg |
| 235681 | gtgacagaga aagaccttgt ctctaaaaag aagcctccag gaatgggaaa cccaagttaa |
| 235741 | atcagctccc actccaccct aactcccttc ctaagccttc cttaagggaa aaagaacaaa |
| 235801 | atactgagcc cagtagtaag gaaagaNcag tgaaagcccc agttaggaaa ccatgaaaga |
| 235861 | gaagaaatga ggtacacagg gagaaaacgt ggatgaaaac cctagactat ggccaccaac |
| 235921 | agacccaagc tagccaggtg tagacctctg tgacacctag aggtcaagtc caagaggtca |
| 235981 | gctgaagtta cgaaaggcag gcaggaactc aatcagctac ctacttgtcc acgagctagc |
| 236041 | cctccccagg cctggcatct atgcttacct cctggcccac tcctgctggc ctctccacag |
| 236101 | gcacaggtga ggccctaaac accaggaatc ttctaatgtg tgctgccttc tcccacgtct |
| 236161 | gtcccatttc ctaggagtta atcatggtgc ccattgcaac atggcaccca atgccacttt |
| 236221 | ccagagtagt gtgacgtcca attccaagac ctggaggata aaaggtatta aagctcctgg |
| 236281 | gaccacagaa gagacagggc agaaagctgg tggaaaacca tctccaacat ctgtttcttt |
| 236341 | ttctgttaaa atctatccac tgtgtgaatt gccaaggaaa gttaagattc ctgttctgaa |
| 236401 | acgagaaggg ttctcttttc acatgacacc tgcagaagat gggaaacatg ataccccctg |
| 236461 | cagatcagag gacaccggct ccctgtaaga ggatacccca acccttgtca gtgcagcacc |
| 236521 | cggcagggcg atttttacat ttttctcctc ttgctgaagg gcctccagaa aggccaccag |
| 236581 | ggctttcccc aagagtaaaa ttctccccag ctccctagga ggtctcactg cccaccaccc |
| 236641 | ctttatttag ctaagtagca gagtttttat tttactgttt attttatttt attttatttt |
| 236701 | attttatttt attttatttt attttatttg agacagtctc cttctgtcac ccaggccgga |
| 236761 | atacaatggc atgatctcag ctcactgcaa cctctacctc ctgtgctcga gcaattctca |
| 236821 | tgtctcagcc tcccgagtag ctgggattac aggcacgtgc caccacaccc agctaatttt |
| 236881 | tatattttta gtagagatgg ggtttcacca tgttggccag gctagtcttt tttttttttt |
| 236941 | tttttttttt Ytgagacgga gtctcactct gtcgcccagg ctggagtgca gtggtgcgat |
| 237001 | ctcggctcac tgcaagctcc gcctcctggg ttcacgccat tctcctgcca cagcctttgg |
| 237061 | agtagctggg actacaggcg cccgccacca cgcccggcta atttttttgt atttttagta |
| 237121 | gagacgaggt ttcaccatgt tagccaggat ggtctcRatc tcctgacctt gtgatctgcc |
| 237181 | cacctcggcc tcccaaagtg ctgggattac aggcgtgagc caccacgccc agcctaggat |
| 237241 | agtcttgaac tcctggcctc gagtaatctg cctgcctcag cctcccaaag tgctgggatt |
| 237301 | atgagccact gcacccRgcc agtagcagag tttttaaata acttccagag ccctttactg |
| 237361 | gaRacacacc caagaagatg ggctcttatt cttcccacag aggactatag accatcaact |
| 237421 | aaattcactg gctcctactc aagctataga aagctgagga ggaccttgga acatcctctc |
| 237481 | taaattcctc ccctagttcc agtccaggta aacaaaaatt gattctattt tttcaaaaca |
| 237541 | ccagcccctt cagatggcct ggttaatctt cattaacatg ttatcttcat taacatgttt |
| 237601 | atcttcatta acatatttct cagtgataag aagggcccag ggttcaacat cccactttgc |
| 237661 | atccatgcag acaagggctg tgggaagctg taaaactgaa gaggcggtga atccaggagg |
| 237721 | gattccccag atatccgtga gttggtgttt gactttcttg aacacgtctt tcctttactt |
| 237781 | tacacttaca cttactgagc attcactctg gaccagaccg cgtcctaaga gcttcacgtg |
| 237841 | tgtggtcatt caatcctcaa accaatccta tggggtaggt actggagtta agtgatggcg |
| 237901 | ctgggatttt aacccagaag tctgattgca aagcccaact taccatgagg gccacgacat |
| 237961 | atgtctctac ttacggattc caccagtact cttgacagga gcatttacct cactatatta |
| 238021 | taagccttga tctacttttc tatctccctg aagcataatc agccataatc tgctaaccgt |
| 238081 | gcctcagttt tcattctcct ttctattttt ttttcagcgg gggcagggga gacagaatct |
| 238141 | tgctctgtca cccaggctgg agtgcagtgg ctcaatctgg gctcactaca acctccgcct |
| 238201 | cccaggttta agtgattctc ccacctcagc ctcccgagta gctgggatta caggcacgta |
| 238261 | ccaccatgcc cagctaattt ttgtattttt agtagagacg ggctttcacc atgttggcca |
| 238321 | agctagtctt aaactcctga cctcaggtga tccacccgcc tcagcctccc aaagtgctgg |
| 238381 | gattaaaggt gtgagccacc gcccagcctc attctccttt ctttattttt atgatagcct |
| 238441 | ctaccttgag tttcacccaa gcctatggcc atctgctcca aactacattt cccaacatcc |
| 238501 | cttgtggcca ggtgtggcca tgggcctaag ctaagccaat gggatatgag tggaagctcc |
| 238561 | ttaatgacaa gctacttgcc tttggatttc acctcctgct tctcacatcc tgaaatacag |
| 238621 | acttaaggat acaaaataga ctaaaacctg ggtccatgaa tgatgacttt ctggacctac |
| 238681 | cttacctgcc tggtgtgctc gccaaacgac ttatttgaca aataaataaa cttctgtctt |
| 238741 | atttagcttt tttaattttt tttatttttt tttggacaca gagtctcgct ctgtcgccca |
| 238801 | ggctggagtg caagtgcaat ggcgcgatct cggctcactg caacctctgc ctcctgggtt |
| 238861 | caagcKattc tcctgcctca gcttcccaag tagctgggat tacaagcatg caccaccatg |
| 238921 | cccggctaat ttttgtattt ttaagtagag acagggtttc actatgttgc ccaggctggc |
| 238981 | ctcaaattcc tggcttcatg tgatccgccc gccttggcct cccaaagtgc tgagattata |
| 239041 | ggcatgagcc actgtaccta gacttatgta gccattctat ttggggacct ctttgttata |
| 239101 | gcagcttagc ctgtatgctg gattcagcac ctgaagtccc acagcttgtc ttattctatt |
| 239161 | caacatctcc agaacccttt cttagggctt ggaacatagt agttgctcag taaatatttg |
| 239221 | ttagctgaat gaaaacacca ttatgtaaag caggtagtac cagggctaaa caaactgatt |
| 239281 | tactcaagct gtgcaggtgt cccgtatcca ggtgactaca atgtttcctg ctttcctgga |
| 239341 | aaacaggagt tcaggacaga gagagtaggt ttaggaaagc atttgcaata ggaaaggggt |
| 239401 | aagctttcac tgcatctgtt gttggctctc tgctgagaca acagattttg ggcttaatca |
| 239461 | aaagttagct gaggttactt cttgtctgat aaaaataatg ggctccattt gagcacttac |
| 239521 | tgtgtgccag gttctgtact aagcgcttca catacattat ggcattcatt ttcattcaat |
| 239581 | tctcacaata accctacaag gtagaaaata ttaatatctc cagatgaaca aaccaggccc |
| 239641 | ccaaaaaagt taaataactt gccctagctg catggctcgt tagtgacaaa agtaaaattc |
| 239701 | aaacccaagt tgtttgagcc taaacttact ctcttcataa ccaatctgcc actctgcttc |
| 239761 | tcttcctgtg tgacaagcca atattcccMa ctatggttat aagtttcaag ggctggacca |
| 239821 | cgttttgtgc ttatctcaat agacgccaca ggcacggagc ttccactggt ggctgtgaca |
| 239881 | cttcttctct gtgcatgatt ggtgaggggt tgcacacacc caccaggaga catgacggca |
| 239941 | gagggcaaac actctgagac ccagggtcca cccagctctc ttttgccctc tcctctccct |
| 240001 | gggctgcccc ggctgcctcc ttgacctctg cactcttctg cccacgctgc tgccgcccac |
| 240061 | atcttggaca gcatcccccg gggccgcctt cctgcctgtc tttgtgtaca attcctgcca |
| 240121 | ggcccggcag ttctcctagc taaagccggc aaggtccaga cctgcccgtY tggcctggta |
| 240181 | atggtgtggt ccacatttca cctcccacct tcaccctaac ttcatcctca tggccattct |
| 240241 | ttatccacaa caactccttc ctccccattc cctagactca gcaaagcagt caggagctag |
| 240301 | gcaaggtggc ctttatccca gaggttggga taaacctagg gctcataaat ctagggctgt |
| 240361 | gagccaaata cggcccctgg gattgctttc tggttgtgca ctatgctttt tgaaaactga |
| 240421 | gttagctagK tttaggctgg gcacagtggc tcaYgcctgt aatctcagca atttgggagg |
| 240481 | ccaacctggg tggatcacct gaggtcagga gttcaagacc agcctgacca acatggtgaa |
| 240541 | accacatctt tacttaaaaa atacaaaatt agccaggcat ggtgtcatat gcctgtaatc |
| 240601 | ccagctcctt gggaggctga ggctgaagaa tcgcttgaac ccaggaggtg gaggttgcag |
| 240661 | tgagccgaga tcataccact gcactccWgc ctaggcgaca gagagaaact ccatctaaaa |
| 240721 | aaaaaattag ctaggtttaa agtcattaga ggtcatataa aaatgcaaat ttcaaacttc |
| 240781 | tctcagaaaa tcaggagccg tgacaacact gggctcacct ccccatgtgg caaatggctt |
| 240841 | gggttgaatg tgaacatcct ccctggaagg gcataaactt cccagttgac cacagtacag |
| 240901 | tcccccaacc cccacctccc accaactccc tattcttcgt ctcctacagg tttacatggc |
| 240961 | ctgactagcc cccagaggca ttggagtttg acacgcccac agcagtgcct ccattttgcc |
| 241021 | gatgagcaaa ctgagaaaag gcaaagagaa attagtcccc cagatctcca agtgagttca |
| 241081 | tcagcaaatc cagggctggc aatcattaga caatatttat ccagctccca gatgtccccg |
| 241141 | cccctgctct gttcagtcac tgcactcatc catgtggctg ccccaatgcc ttgggcatgc |
| 241201 | cagagagaca cctcattctt tcaacacaca ggtcacaaac atcttttgtg ccatgacaat |
| 241261 | ctgattctcc tcacgtcacc ccaagattaa ctcttttcaa atctgtggtt cagattatac |
| 241321 | accctgaagc tgctgagggg tgacctctca ataaggctaa tctcccctgg acctaaatac |
| 241381 | tggtggggcg tgtgtgcatg tgtgcatgtg tgtNtgtgtg cgcRcgcgca tgtgtgtacc |
| 241441 | catgtgaact cgctcatgca tgtgcttcta gattaacact ctttcttctc attaacttcc |
| 241501 | cagacaggtg agaagtcaac atttgcccca gttagagaac cagaaagtat cagtcccact |
| 241561 | gccccatcta aaggggcagc agctgctgat ggttgccata gtggaatgaa gattcagggt |
| 241621 | tgccagatct ttcaactttt caagaagcca ggaatataac ttagaagagg ggagcaatgg |
| 241681 | tctctaaaga cctgtgctga gaaacaagtt cctaagtgct tgggagaatt tatgaggacc |
| 241741 | Rggtgctaga gaatgccggg aaatgaaYgc tcccctttga acgtcccatt ggtgaggtca |
| 241801 | gaactatgtc ctcaatccct catcagccta tcccaggact ctgaagagga ccccagggtg |
| 241861 | cttggctggc tttgccttcc agcctaagaa tgtctttgac taatattttt cttaatccct |
| 241921 | gtttgctctg tcctcaaaac aagccttttt ctctttttct tatccatctt ctccatagag |
| 241981 | ccctcaggtt cttaactcac acggcactat ctggatcttt ccagtaagta ggttgccgtt |
| 242041 | tccatttctt tgattaaaca actctaacaa agaattcatt gagatgaaaa tgcttatcat |
| 242101 | gaagcaggta acatcctttt cctccccaaa ccacaagcaa ttaacatata aatggcctgg |
| 242161 | caaagggact tctttgagag gtggcagatt ataactactc ttgctcctac acggataaag |
| 242221 | ctttttttta aagacaggaa agaacaattt acaaatgaga aaatgtcaca gatggccaca |
| 242281 | aactaacttc ccgagggatg agtattttga tgcagatact tcttcaagtg aaaaatgtac |
| 242341 | aatgtacaaa atgtccactY gaggatctgt tcctccccgt gtgggtaatc gccctcctac |
| 242401 | cacgggcaac gggtaggcaa ccgatatgcc cagaaaggcg gccaatggga ggacagctcg |
| 242461 | cccagcctcc cgattggcca ggcccgccac cagctggaac catggcgagc tttgaggaca |
| 242521 | gcagagccac ttgatgggat tctctctctc ttcaaagcat agagcaaaca tcaattaatc |
| 242581 | ctcaaaagac gctttcaaga agaacattat cccttttgga gacgcagaag ctaagaggtg |
| 242641 | ccgcaggtag gtgaagggaa ggcaggaagt tgaagaggag aggagaaagt ggagcaccgg |
| 242701 | gctttcagcc ccagttctgg ttctcctgag agagtcaagt tgcaggagaa gaatgaacct |
| 242761 | gcagaagccg ggcagggaga ggtggtggag aagccgctgc tcttgggtgc gcccctcaag |
| 242821 | gcttcccact gccccatccc ctaggagacc acggagtgaa aaaagttgga ggcctaagta |
| 242881 | cagccgtgtg tacccagccg ggcaccagag ttaagacaac tggacttgtg ctcaaaaacc |
| 242941 | cttctttagt aaaacaWccc gtaggagtct gtgggaggag gaaaaattga agtctggatg |
| 243001 | caatttgcca cactgagtct gttctggtaa ccgcccccaa cacactcaca cccccttgcc |
| 243061 | tgaaatgggg agaggggtgg gatcggtgtg tgtaaacaga ggcactgccc tgcctggctg |
| 243121 | ctctttccat cttaggagaa ccaatccaga actttctacg gctcacactc tgatcacagc |
| 243181 | ctgtcgccat gattggcaat aaacgtcaca cattctcacg ttatacattt attcgacctt |
| 243241 | taatattgtg ctctgagatt cctggaaaac ttgtatgtca ttggtcaaac gttataaaaa |
| 243301 | cagcccacta ttttttcccc actcacatcg tccgtgttga ctgccttaca caccRatttc |
| 243361 | tacatggaat gtttttagcc tgcattttaa cacttagaat aactttcttt gccacacact |
| 243421 | acatacatac tgtttgcatc aataaacaga gcccgtgcca catgcaagtt ataggtttat |
| 243481 | tggagacatt taagtgttta tagaaaggac ttttctaaag aatctgaatg ggagttctct |
| 243541 | caatttacca atagtcaaag aaataaagaa aattacccta cagctgattt tttttWaatt |
| 243601 | aaactaccaa caactattct gccatagcct tgcgtgtgtg tgtgtgtRtg tgtgtgtgtg |
| 243661 | tgtRtgcatg cttgctgagg catagaaaat atctggaagg atttacaaaa actccttagc |
| 243721 | tttggggaac agaatggaca gacagagaga aaacctcttt ttttcttgtt ttatgttctt |
| 243781 | taYtgtgcat tgtttacaat cagcatgttg ttgtttttYt ttttaagact agtcaagagc |
| 243841 | agcagtgaga aagggggaag gaaagaacaa ggagttcaat ctgtaactgt gaacaatcaa |
| 243901 | ttgagataac tcactaccct cagactagcc accatgttgc tttttaaatg tttcaaatca |
| 243961 | caaaatgaaa aagttactct aagatcatct attttttccc caggtgtggt attttgtccc |
| 244021 | catgcctgtg caaagtaagc cagtagaatt tagaaatagc ttgctgcctt tttttttttt |
| 244081 | tttttttttt tgagatagaa gcttgctcta ttaaccaggc tgcagtgcag tggcacgatc |
| 244141 | ttggctcaac acaacctctg cctcccagat tcaagtgatt ctcctgcctc agcctcccaa |
| 244201 | gtagctggta ctacaggcgc ggaccaccat gcctggctaa tttttagtag agacggggtt |
| 244261 | tcactatgtt ggccaggatg gtctcaaact cctgaccttg tgatctgcct gccttaggct |
| 244321 | cccaaagacc tgggattaca ggcatgagcc accatgcccg gcctgctacc ttttttacat |
| 244381 | acacaaaata attgcaaact ttcactgcag tactgccaac cctcatgtca ccatctacaa |
| 244441 | tgtaccacgt caagaaagga caatatcttc aaacccactt accagaagaa aaggttgaag |
| 244501 | ctgtatttgg caggatactg acatacaaac ctccaagatc tgggaaacaa ctcaggctcc |
| 244561 | ttgacttgac ttccttaacg atgacttgag aaacaccaga aagtccagaa cacataaact |
| 244621 | catgaaacca accaatagac tggaatctct cctgttatta aagtcatctt tttggccagg |
| 244881 | cgcagtgcct cacacctgta atcccagcac tttgggaggc caagatgggc ggatcacttg |
| 244741 | gggtcaggag ttcgagacca gcctggccaa catggtgaaa ccctgtctct actaaaaata |
| 244801 | caaaaattag ccaggcaagg tagtgcatgc tatagtccca gctactcttg aggctgaggc |
| 244861 | aggagaattg cttgaacccg ggaggtggag gttgcagtga gccgagatca cactctactc |
| 244921 | tctctactct actccagcct gggtgataga gtgaaatcct gtgtcaaaaa aaaagaaaaa |
| 244981 | acaaatcatc ttttattctc ttaaagaatg aatttttcat gggccatcaa cttcttcagt |
| 245041 | catttaagta tttgtttaga gaatatttca gttagaaact caggaaatgg agacctgacc |
| 245101 | tcaaagggcc ctttccagtc ataaagtaat tagaaataaa ataaaaacag gttgaagtga |
| 245161 | taagctgata agaaaatcca atttgtttcc aaaattgttc acttacagct gtttttctca |
| 245221 | tgaatatagc tatagttgtc atcagcaaat cagtggcttg gaattcgaaa ggagtgaaaa |
| 245281 | tatacatcct gggtctcttg aactcctagt gtttgccaga gctaggcagc aggatcaaat |
| 245341 | ggtcaatttc agcctggccc tgaaatcaaa accctctaac agtcacagaa gttctgcagc |
| 245401 | tagtcagtta cttactgccc acacttcact cagcacaatc cttaaagtca ccagagggag |
| 245461 | cccaaatttg cgacaaacca gaatgctttc cttttagggc atagttgtcc ttctgattct |
| 245521 | acttttgccc tctcctttcc aagactaatt tagaaacgaa gggaagtagg ctaagaaaat |
| 245581 | cctcaccttt aatattaata agacttgtgc agtccccgga tgatcagagc ccagactaca |
| 245641 | taggacttga aagaaagaat gagactttga tatggaatat gaaaaagtaa caggtaggag |
| 245701 | gggtggagag accaaactga gaggcctagg gcccagcttc tgcagctctg tcactgactg |
| 245761 | gcccRgtgac gatcacgcct atttactaag cagggatgac ctacgcttac ctgtctacat |
| 245821 | ttttatctgt gagatgaacg aaatgaaacc tccaatggtt tatttgccat gacaattttt |
| 245881 | aaaaatcagt aggaatgagg gaattaggaa ttgagcccat gctatacctt cttttcaaaa |
| 245941 | gagatttcac atgtaccatc tcatctgtat tcctggagag atagtagccc attatgagtg |
| 246001 | gctccaattt acagaaaaag taactaaggc acagagtggt gatctaccca ggacagcatg |
| 246061 | gtctgtagaa gaagcattgg tctgtttaKt gcattgaaat gtattccaga gatattggtc |
| 246121 | tgtaaagacc ttcccagaat gtgtctagaa ggttcaacca cctggtggaa gacatagaac |
| 246181 | gccttgtcat gccttcccca ttccagcctg gagttctctc catggtctca gcctgcttct |
| 246241 | atgaagctta gttttatagg gagcctttta accaagccaa cctcagagtc ccactggcca |
| 246301 | aggggatggt gggggaggca aaggattcta ctggggcagt atgtaaccca catataagtt |
| 246361 | ccatccaaag caacgcttcc aaacctagct caccaggaca ggagaaaggt taccatcagg |
| 246421 | gtactcttag ctgagaactc atacctttcg ggctttYatt ggcttgaggc atgagtgatc |
| 246481 | agcaRagccc cacatcacaa tccctgtact cagatataaa ttatattagt gggcaKggaa |
| 246541 | tgtcaggaaa cttaggttgt agaatctaga tcaacaactg cttacYgagg agctgggtga |
| 246601 | attgtaaaga aagaaagaaa caagtgttga atgactgtgg cctcattaaa catttctgtg |
| 246661 | gcctggcctg tgctttgggc tttcccagag ctgtttcatg caatagcttt gggcagggca |
| 246721 | cttctttgga cttactccaa ctacacaagg aggaggagga tgtctatggt tctttccacc |
| 246781 | ccagacacag tatcagtcac agccccacct taattccact actccaattc tgttctgagg |
| 246841 | gtatcacagg atgctgtggt gggttcccca gccccacaaa atccttttct cctctaaaac |
| 246901 | aggagaacat ctttccttcc tttctgatca tccatcttgc agccagcagg actcccagcc |
| 246961 | agaacattgt caatttactc agggatccat gaggcacctt ttggaagatg agaggggttg |
| 247021 | ggtgaaaaaa ggaagaggaa gtggggtgct ggtacttctg gaaacaagcc atttctcagc |
| 247081 | ctgctctgtg aaggtccccc aaaccctaca cagatctagg aagggaaact gcattccaag |
| 247141 | aatgcatggg ggctagaagg acccgctgga gcatggatcc cacccacagg agataatatt |
| 247201 | ttgaaaagag cacacattta accagggaag aagagcccat gccctggctt aagagcatag |
| 247261 | ctgtttcctc ctccatctgc ccccattttc ccaggcctga ctagagcaag tagttaagcc |
| 247321 | aacccaaatc cagaagtatg aataatgcgt gaagcMcagg aggacaggca gatggccttt |
| 247381 | tcacctgcgc aggctatata gctctgtgcg gaggggctga gagtccagcg cggcccctgt |
| 247441 | gcccctcagt aactgtgcaa gaggaagtgg gcctcccctg cgggggtatg aaatgtgggg |
| 247501 | cgaggactta ggagttcacc gggaagtgcc agccatcctg gggcagacac caagagctgg |
| 247561 | agtgatttgt ttWccctttt ttcatgagtt aatttgcttc cagcagattc cattagtgac |
| 247621 | ctgacagacc aagggcctgg aggaggtccc tggaagagct gctgaatcag cagactaaag |
| 247681 | gggcgaccag gaaggccaga cgtcttgcac cgagcccttt gctcagagtt tctatttgaa |
| 247741 | gagcttagaa taactatttg ctaagctctt gtcaaggcag cacctctaaa ccatgtatgg |
| 247801 | agagaagaca cacaaacctt gaccaccaaa tgtgaatggc caatcagaag ctgacacaat |
| 247861 | cagctgctga ctgaggaaaa atgattttat gggggaaaag aattcccaca tgaaataata |
| 247921 | agcaaaagtt ataaacttat taaaaagctt gttaaaaact tacttaaaaa gcaaaagttt |
| 247981 | aaacatggtt ccatctgcaa ctaggaactg gtcggggagg gagggtttga acttcctttg |
| 248041 | agtttcaatt gataatcccc gaagattaag aaaatagtga tactattact actgctgctg |
| 248101 | ctattattac aaataataat aactacaatt aacatttatt tggcacctag tacatgctag |
| 248161 | gaagtaggca atRagttttt ttgtttgttt gtttgtttgt ttttgagatg gagtctcact |
| 248221 | ctgtcaccag gttggagtgc aggggcgcaa tctcggctca ctgcaacctc cgcctcctgg |
| 248281 | gttcaagcaa ttctcctgcc tcagcctccc gagcagctgg gactacaggc acacgccacc |
| 248341 | atgcccagct aatttttttg tatttttagt agagacggcg tttcaccatg ttggccagga |
| 248401 | tggtctcaat ctcttgaccc tgtgatccgc ccacctcagc ctctcaaagt gctgggatta |
| 248461 | caggcgtgag ccaccacgcc tggcctgcaa ggagttcgtt atgcatgatt tcatttactc |
| 248521 | cttgcaacat ctctttgagg tagggaaact gtgtgggtga gaaaagtcac atagctgcta |
| 248581 | agtcatagaa aacgttcaga gcaaaatcaa acccaggtgt aggccaggtg cagtggctca |
| 248641 | tgcctgtaat cccaggactt tgggaggctc aggcaggcgg attacttgag gccaggagtt |
| 248701 | caagactagc ctgggcaaca tggcgaaacc ccatctctac caaaaatatg aaacaaatta |
| 248761 | gccaggtatg gtggcataca catgtggtcc catctactca ggaggctaag gtgggacgat |
| 248821 | tgcttgagcc tgggaggcgg aggttgcagt gagccaatat cacaccactg cactccagcc |
| 248881 | tgggtgacag agttaagact ctatctcaaa aaaaNaaaaa aaaacccagg tgtgtccaac |
| 248941 | tccaggcttg tgcacttacc cactctgcta tatggctaaa tcccacaggc tacagagaga |
| 249001 | gcagggaagt aggactcagg agaactgcct ccagccccac aggcaccctg actagctgtg |
| 249061 | ggatcttagc aagtgatttc aacttgtggg ccatcgtatt ccatcagatg attgatgtct |
| 249121 | tagggacccc ttcaattcaa accacagtta ttggtggact gcctgagtgc caggcactaa |
| 249181 | gatagggggt gggggaatgt ataaacaaaa ctaaggcgtg gtccttccct ccaggagttt |
| 249241 | acagtctagc cctgccttat gcaaaagcca aagagcctta ggtgtccctt caggtctaaa |
| 249301 | atactactca gagattcctt ttgaacatgc aaagtatttc tgaYagcatt catattcatc |
| 249361 | ttctatttgt tctgtgtgga catttgcatg gagaggtatc tgaaattatg ttcgtccaat |
| 249421 | ggatttgggg tgataatttt gctctcatct ttttactttt atgtgttgct tgaattttta |
| 249481 | gtaacaaata tacatcattt ctataaaaac aaaggcattt ttaaaatact gctaaataac |
| 249541 | actatatatg ggtgtatatg tatatgtata tatgcacaca catacctata tacacatata |
| 249601 | tatttaaaca gtaactggat atttaataat actgtggaat tattgttaac tcagataaga |
| 249661 | ttgtgactag gtttccagaa agaatcttta ttttttgcag atacatactg aaataattta |
| 249721 | cagataaaat gatgtctgag atttatttca aagtaatctc tagtgtgaga gggtaggagt |
| 249781 | aggctataga tgagacaacg ctggctctga gttgcaagtt gtggaagcaa tttgggtgct |
| 249841 | aggtgatggg tataagagtg ttcacgatac tacataggtt tgaaattttc catactatac |
| 249901 | agtaaaaaag gaactccttt caaggccaac agggaagcaa catttcccca aagctaagct |
| 249961 | aagcacccag ctggcagcat ttctacctgg ggtttctacc acccttggct tcctctcttc |
| 250021 | tttgactatc tatcacagtt taacttcatt ggttctctgc agcttcctcc ccccccccNN |
| 250081 | NNacaccatt cccccctaac cttctggaat cacgtgttgt atctatttgt acattccagt |
| 250141 | gcccaggcca tccctcttcg accttaccct ggcccagggg acagagcggg tgggcctgag |
| 250201 | caatgctccc acacacctcc gctcaaagtc agctgtttgc tgtagaggta gaacagcttg |
| 250261 | actactgggg gcgagggtca cagttcactc attcccccag caaatacgga gccagatgct |
| 250321 | ggggactcag cagtgaacaa gaccaaattg ctaccttcac agagttttca tgctagagaa |
| 250381 | ggagccaact ataaatgtta tctcccatcc ctcccagatt tagggccagg ggtatattca |
| 250441 | ccaagacatt cctgaatcac ctgggatctt gtcccaaata atttaaacct gaaagacatg |
| 250501 | atctagtgcc aagagctaga ataccaccca actacccatc ccaatccagt tccccattta |
| 250561 | actgacaaaa aaaaNaaaaa acagaaatgg tgtaagccca ccatgtaagt aaacataagt |
| 250621 | aaacagtggc agaggaaagg gtacccagac ttcactgtgg caggcccacc tgggaccaca |
| 250681 | ttcagaattt ttacaagctt Wgctgcgatg ttgaccaaag ttctccccac tttttttcat |
| 250741 | ttgcttgaat ttcactttta tttttattaa catcttttgt tttgttttgt tttgtttttg |
| 250801 | agacagggtc tcaccctgtt gcccaggcta gaatgcagtg gcacaatcat agctcactac |
| 250861 | aatgtccacc tcccaggctc aagtgatcct cccacctcag cctcccaagt agctaggact |
| 250921 | acaggcacaa gccaacatgc ctgtcttatt ttgttttact ttttgtagag acaatgtctc |
| 250981 | actatgttgc cgaggctatg cttgaactcc tatgctcaag cgatcctacc acctcagcct |
| 251041 | cccaaagtgc tgggattata gtcatgagcc accacacccg gccctttatt aacatcttaa |
| 251101 | atttcgtgtt ataaggcttg ttatacaaaa tagtggtcca ctgcagctta attctttttc |
| 251161 | tttttctttt tctttttttc tgagaaagag tctcactctg tcgccaaggc tggagtgcaa |
| 251221 | tggcacaatc ttggctcacc acaaacctcc acctcctggK ttcaagcaat tctcctgcct |
| 251281 | cagcctcccg agtagctgag attacaggcg tgcaccacca tgcacagcta atttttgtat |
| 251341 | ttttattaga gatggggttt caccatgttg gccaggctgg tctcgaactc ctagcctcag |
| 251401 | gtaatccacc cacctcagcc tcccaaagtg ctgggattac aggcatgagc caccacgccc |
| 251461 | ggcagcttaa ttcttttaat tgaagattgt gatatttacc tacacatctc taaataacat |
| 251521 | gtttttaact gttgtttctt gatttttcag ttttaggctt ccccaagtag gaaagagtgg |
| 251581 | atttaccctt tttgtagcct gtgctttctt atctgttctc actatacaca cacacacaca |
| 251641 | cacacacaca cacacacaca cacacacaga cacatacaca cttcctttct ctccatcccc |
| 251701 | ctatgctcca tctgtctgcc tgcctgctta ctatctatca tctatctgtc tgtctccttc |
| 251761 | ctccctccct ctctcgctca ctctgtgtat gtatgtactg gtgaatatat atttttattt |
| 251821 | ctcaatgatt accgttttta ttgctatgat tatgtaaRct ctattcagaa ctgtgacatg |
| 251881 | tagtattctc tagttacatt tcctccactg gataacttgc attcctggaa ttaataattg |
| 251941 | tcttatttaa ttcatttgct tagtattgta tgtactcacc RctaattcaR acccctagct |
| 252001 | ctccttaagt tgtgtatatt ctctctcaat atgttgagta tgtttctcac ccacttttga |
| 252061 | gggtgaattt ggtcattttg ctagcaaaca tgattgtagc agttttaaaa aacaaaactt |
| 252121 | ccctgccaga gataacttat acaccttgct aatataacca gtgacctcct atgtgagtgc |
| 252181 | ttgatcatgg aaaacattta gccatgtttg gctaatccta acaaagacta catttggtgc |
| 252241 | acgagaactt ccaaatcacc tttcttagca aaagaaagag agaaagaaaa gaaagaaaga |
| 252301 | gagagagaaa gaagaaagag agagaNagaa agaaagagaa agaaagaaag aaagaaagaa |
| 252361 | agaaagaaag aaagaaagaa agaaagaaag aaagaaagaa agaaggaaag aatttggaaa |
| 252421 | aacagcattt tcaatttttc ttactttatc acaataatgg aaatggtgtc ataaggtttt |
| 252481 | aatgcattca tcaaaataca gcatgttcta tattacttgt ggatttacca ttgttctaac |
| 252541 | aaaaaagtat gtattatatg ctttcaccca tagactgtaa gctctaagaa ggcaaaccgc |
| 252601 | ttcagcccta cttttctgaa atatcctcat cacctagcac aatgcctccc atgtaattag |
| 252661 | agctaataaa catttcttga attgaatccc aatgtgcttt aagaatggga gctcagtggc |
| 252721 | acacgaYctg agttagttcc ctgtgccttt atagcaacca gtttgcatcc aggtcccagt |
| 252781 | gaggcccact ggacagttcc ctaacccccc ctgcatgcta tcaacaatgc acctgctctt |
| 252841 | ggccatttcc acctggaagt tgaattggcc tctcaagcct tccagacgaa gtggagccca |
| 252901 | cacacacctg ctgccctcac agtcctcacc atcacaacaa tccacYgtct catcttccac |
| 252961 | ttgctcaggc caaatggatg cctctcttgt tgtcacatcc tactttcaat tccatcttaa |
| 253021 | tcccatcatc tctaccttca aaatgtactc agaatcagct acctctcacc acctttgctg |
| 253081 | ttaccacgtg gtccaagtca ctgcctcctc catctactct caactcagca gccagagtga |
| 253141 | tgctgtaaaa ccttctggta ggtcccaact ccaaggataa gccaaagtgc tcctattcct |
| 253201 | cccactccct ctcactctgc accagccaca tggcttccct tgctgttctt caaaacatca |
| 253261 | gccatgcctc cacctctgga cctttgcacc tgctgttccc tctgacttga atcctcttct |
| 253321 | cctggatgac cctcaaatgt tgcttctcag ggagcttttc ccccaacact cctggtccca |
| 253381 | actccccatt ttagttacct ccataaactt ctcaccatct cacttcttta cttagttaca |
| 253441 | ttatcatctg ggtgccccca ctagaatgca agctccatga aggcaaggat tttgcccaat |
| 253501 | ttgttcactg ctctatgtct agcacccaga atagtgtgac taattcaaca ataagtattt |
| 253561 | gttgaattaa attaatccta ggacacctgg aaatattttt atatccccat tagggaggaa |
| 253621 | aaattacaga atctccttcc agatatatta ttccatttat atatatatat atatatatat |
| 253681 | atatatatat atatatatat gtgtgtgtat acatatatgt gtgtgtgtgt gtgtgtatat |
| 253741 | atatatgtgt gtgtgtgtgt gtgtgtgtgt gtgtgtgtat ccccaggcct ttctcaagca |
| 253801 | aataaataag ctctaatgaa tttcaaaaga caaagaaatc tcatttcatt ttaacttttt |
| 253861 | ctcacccttc ccaagtcagg gaccacctcc tctcctcccc ggcccaaagc tggaaactgt |
| 253921 | gtgctcagtg gactcaggag gagttgcagg tgccaccgac ctgaaggcaa ttaccaccca |
| 253981 | caagtttcag gggaagagaa gattaccgag aaagggaaga gaaattagca catagatgag |
| 254041 | aaacacatgt ttaaaaactc cttctgaggt catgagtaag ctgattgaag ctggcaccag |
| 254101 | agtgacaaat taatttcatg accctcttgc tttcattggg aaatgtagga ttctaaaaaa |
| 254161 | aaaaaaaaaa aaagcaaccg atgtgtagaa aagggcacRt gtgtctgccc acatgcctat |
| 254221 | atagagtggt ctggtaagaa aacaagctgt tttccagtgc atttgttttg aatgtgcatt |
| 254281 | gagccaccta ctgtgtgccc agcagaccag agatagctaa ggctcaattc ctttactcaa |
| 254341 | ggaactccag caggtgagag tggctagcat agacacagcc caccagaagt cactatgcca |
| 254401 | ctgtgcaaat gttctgctgg caggaattaa gcactagggg cagctgttct gcctagaaag |
| 254461 | aagtctcggg ccttgaagtg tgcatagaca ctggaagagc tcatcaagta gagacctggg |
| 254521 | ggtcggggaa gaagtcctgg cagagaaggt cacagaagca aaggcctgga ggtgggaagc |
| 254581 | ccatggtggg atgtgattca agctcagagt ctgccaaaag gtggtggaat gggaggctga |
| 254641 | aatgtgaatg ttggtctagg gagtctggca tcctcctctg gtaagtgcgc cctggtccct |
| 254701 | ccagagagaa ttgatccctc ccctcctttg catcccaccc acccccatac acactcccca |
| 254761 | gggctcacac ccagctcagg gcctgggcac agggcatcac ctgctccctc ttcatggact |
| 254821 | gcttctcctc ccgacaaatg cctctccctc ccatccagca ggtctctgct caatcaccac |
| 254881 | cttctcagtg aagccacctc tcgcaccccc tacaagggga caaacccaca catacgtgtc |
| 254941 | cctactttgc tttattttct gccacagcat ttacacttgt gtttYtggtc agtgtcggcc |
| 255001 | tcctccactg gactgcgggc tccatgaagg cagggacttt gttttatcga ctgccatatc |
| 255061 | cccagcacct acagtgcttg gcacttagtg agagctcaat aaatatttga caaattaata |
| 255121 | aaaaatgcct gtaacacttg agtgacttgg gttgtttatt tcttcccctc ctacaagatt |
| 255181 | gaaaatggat atgaaagcaa agcttgagct ttcagctctc taccccggcc ctgtgcatgg |
| 255241 | tgctgcccag gttggcactc agtaattagc ggatggatgg atggatggat ggatggatgg |
| 255301 | atggatggat ggattctata atcWgtagga gccatcaaaa gtataaagaa actgaactgt |
| 255361 | gcaatgcctt tcctgtgggg aaaagtggcc tgatggggta gaagcactgc aggctgggag |
| 255421 | gtcaacgagg aagctcctgc cagtgtcccc acaagccaca atgtggcctg aatgggaggt |
| 255481 | gaacagagta ggggacagag tccagagaca tacccaaggt taagccaata tgactcggga |
| 255541 | ccaagtgtaa gtcaggacga ggggagggag gagccaaaga tgatgctcag atttttgctt |
| 255601 | agatgacagt gaactccaag gggaataagc agctttaagg gaagaagttc aattcattca |
| 255661 | ggatggaagt gtgagggagg acatcMaggc agtagaatgg tcaggaggag agagggaRat |
| 255721 | tgagtcacgg gtgctggctg gagtcatggg aatccactca ttcatttatc tttttgagcc |
| 255781 | catgccaggt cccaggcatt tactctgcta gagactatgg acgctgcagt gcccaagaca |
| 255841 | ggcaaggtct gtgctctcat ggaacttact ttcggagagg aaaggcagac aaaggaaaag |
| 255901 | tgagcaaaca gatccataga gataatttct gatattgtat gcactgtgaa gaaaataaaa |
| 255961 | ccaggccatg ggagcatgat gcggggacaa tattagatag gttgggccag gaagggcctt |
| 256021 | ctgaagaagt ggcttttgcc acaatgaggt agagaatggg gatgacgacg aagttcctgc |
| 256081 | ttcttggctt caattttctt gaacaaatct ggggtgaaat catcggctga gagcagagag |
| 256141 | atggaaaggg ttttcaggta aatggaaaaa cattggacta ttctctgcca taggaagaaa |
| 256201 | tggaaagggt gagaagagat tatgatggtg caccgaggac ctcactgacg gctgaaacca |
| 256261 | caggggggta aggagcccat caatgcaggg cgtgtgcaag tttcacaggt ctcatatatc |
| 256321 | Ratgaagctt tatgtccttg ccactgaatt gacatcagca ctaggccggg tgcatcggct |
| 256381 | catgcctgta atcccagccc tttgggaggc agaggcaggc agatcacttg aggtcaggag |
| 256441 | tttgagacca gcctggccaa catgatgaaa ccccgtctct actaaaaaca caaaaattag |
| 256501 | ctgggtgtgg tgatgtgcac ctgtaatccc agctacttgg gaggctgagg caggagaatc |
| 256561 | acttgaaccc agaaggcgga ggatgcagtg agccaagatc actccattgc actccagcct |
| 256621 | aggtgacaga gcaagactca gtctcagaaa aaaaataaaa aagaaagcag cactaatgcc |
| 256681 | ctggcagcaa tgtggaagct ctgtctccac tttgtatgag atgggcttgc cggcttgttg |
| 256741 | atttgatggt aatttagttt gatgggctat gagggttttc attacttggt tttaccaggc |
| 256801 | acattcccac caccacctct tccacagact gaggtcacct cagtctgttc ctgccacagc |
| 256861 | ctccacgcac aagccatcct gcaaattaat caccctcaac attcatcgtg ccaaacctta |
| 256921 | agtaactccc cagcacctgc aggatcagtg ccaaactttt cgcccaagta tttataatca |
| 256981 | ggtccttcgt gacctgtcca gcttctctct cccagtgacc tggctggtgt tctcactgct |
| 257041 | cctttctgaa cccaagctta ttcgaatgca caggctcagg tacccgcctc tgCtccatcg |
| 257101 | ataccagcca tggagtcttg ggcaaatctt gggcaactcc ttggagtttt ctcatcgata |
| 257161 | aaaaagttaa tatggctggg tgtggtggct cacgcctata atcccagcac tttgggaggc |
| 257221 | cgaggagggc ggatcacctg aggttgggag tttgaaacca gcctgaccaa cacgaagaaa |
| 257281 | ccccatctct actaaaaata caaaattagc tgggcatggt ggcacatgcc tgtaatccca |
| 257341 | gctactcggg aggctgagac aggagaatcg cttgaaccca ggaggtggat gttgcagtga |
| 257401 | gcgaagtttg caccattgca ctccagcctg ggcaacaaga gcgaaactcc atccgactcg |
| 257461 | tgatccaccc gactcggcct cccaaagtgc tgggattata ggagtgagcc atcatgccta |
| 257521 | gcccactggt actcattttc taagggtatt cttttctaac cRgaccacga aatctccagg |
| 257581 | ctacctcaag ggtcttacaa ggaggaagca aaggcctagg tgcccaaata ctggtatttc |
| 257641 | aacaggacgg cttttatttt taataaaata atttttatag agatggggtc tcactgtgtt |
| 257701 | gtccgggttg ttctcaaact cccgggctcc aacaatcctc ccacctcagt ctcccaaagt |
| 257761 | gctgggatta caggtgtaac agctttttat aggagttctg cctcctacag cttcatactg |
| 257821 | gaaaatacga gcaaaaaatg ttgagcacat ctatgatgag taagggagat gagttgcact |
| 257881 | gtatggagaa cctgatccca ggcctggccc cacctttttt taactgtgag gcctgaggac |
| 257941 | tatcccaggc catccaggcc tctggtgtca cgtctagata gtgaggaaga acccccttcc |
| 258001 | atggtctcta aggtggttcc tagatctatt attccaagca ctagctctcc tatgagctgt |
| 258061 | actgttgagg ggcagagggg tcaaaagaac cttctccctc tctggccgat agatggttgg |
| 258121 | ggtactctga aagcttctct gttccctctg cccattctcc tctaaggtgt ttcattcaat |
| 258181 | agacataaaa acaagagcat cacactgcaa agtctgaaca attgaagaga tgccccgccc |
| 258241 | tccatgacta tcaaagttgg gggatggata cttgggggtt ctttatacta ttctttctac |
| 258301 | tgttgtataa gcttgatatc ttccacaata agtttgtttt ttgttttttg ttttattggg |
| 258361 | agattctcac tctgttaccc aggctggagt gcagtggcac aatctcggct cactgcaacc |
| 258421 | tctacctccc aggctcaagg gatcctccca cctcggcctc ctgtgtagCt gggaccacag |
| 258481 | gtgtgtgtca ccatgcctgg ctattttttt gtattttttt ctggagacgg catttcacca |
| 258541 | tgttgcccag gctgatcttg aactcctgga ctcaagcaat gtggctgcct cggcctccca |
| 258601 | aagtgctgga ttactgagcc accacaccca gccagaagaa gtgagaataa cagcaataaa |
| 258661 | ctcacctgat tccacccttt catgtactaa ctagatatgg atcttttgag ccctcaaaaa |
| 258721 | ggtactgatc tttttttaaa ggaactacat ctgaacatcg taagattcaa tgccttttta |
| 258781 | accttgcaca ttggagaaag aggtatgaag gaagaagggc aaagggtacc tgggagtcag |
| 258841 | acRtctctct cctcccacca actccatcac tttgtaatgK tctctactag gatgcccaag |
| 258901 | ttcccagagc cctagtctcc tcaattgcat ttttgagggg cctaaaggag accaccttgc |
| 258961 | ctcaaaagca cttgttccgg ttataaccac tcccacacac atttaaagca tccctttgtt |
| 259021 | gttgcatatg cagggctggg aggaacaatg gtgctgaaaY tttccaggac atgaaaatcc |
| 259081 | gattgcatgg cctcacccct agggattttg attcagtggc tccagcggag gaggcccagg |
| 259141 | aatctacctt tccatcagtc acacaggtgc ccctcctgta ggtagtcctc agaggacacc |
| 259201 | ttgagaaaac caaaggaaaa gcagagggag gcaaactgct cagtgctacc tgggaggaaa |
| 259261 | acaatctacc tatagcatgg aaaacctcca aggagcaggc agggagtgtc catcagaatg |
| 259321 | acaggaagga gcgaggcagt taaagggaaa gcaccatcat caaagccttc tccagctaat |
| 259381 | accttgtcct tcctgcatat gctcctatct catttttatt ttctaaattt tacccagaca |
| 259441 | agcttcccca aaacccactc atcctgacct tcccgggctc catcactaaa tctccccatg |
| 259501 | gccaggggaa cttttagaaa gtgtactgga tcaagtccct ttcctaactt caatccttcc |
| 259561 | atggctgctt actgccctta ggataaagta cacagccctc aaacttctcc atcaaggccc |
| 259621 | ttcatgacca ggcctctcct gacctctctt accatctcat ccctctccag tgctgcagcc |
| 259681 | acagtggcct tccatgggtc ccccaacatg cacaggacct tggcacatgc tattccctct |
| 259741 | gctgggatca aatgtttcct cttcaaggaa attttccctc aatgccctag accagaaaag |
| 259801 | gtccccctac tatactcttc tatcttcctg gactttccaa cttaacactg atcccacatt |
| 259861 | tacttacata tttgtgtgat tatatgatta acatctgtct tcccaagtgg accataagct |
| 259921 | tcataaagat agggtctgtg ttggtttggc tcaccatcat gtacccaggg tcacagtagc |
| 259981 | tagtacattg tatgtgttca ataatacaac ataaatgccc agtgcactgt ggtctgggga |
| 260041 | gacatggatg aagaaaaaaa gtgagacgca tgcttgaaaa attcataatg caaatgacag |
| 260101 | gccagtgtga gacggtgtgc ttctcctggt catggccact gaaaatcttc tcgactgtca |
| 260161 | cacggatggc gtcactggat gccacaagat ctcaggctct tcccagtaag agcatctctc |
| 260221 | tgggactgtc cccagaggac aatgagaagg tggcttacct cctggggaat gtggggacgg |
| 260281 | aaaaagaggg ctgggagaga gagagtgcca acctcctcaa tccccttctt gttatctcct |
| 260341 | gaaaatgtag cttagtccct cactatcagg actcagagag agaggtgggg aagagaaggt |
| 260401 | cacagacaga aacgatcttc ctccctccta tctggagcca cagaaacagg catacccatg |
| 260461 | ttatctttga gcttgctttt ttttccctag agatgatggg gggtagggtg agcaggaaga |
| 260521 | ttcagagcag tcagttcaga aaacagggtg tttttctgct tggttatcag acccatgccc |
| 260581 | attcaaggga tgcaaaatag gctgaagttt agattctctg actcggctat tgagtcccat |
| 260641 | caattacaac acatggaaaa aactttggac agttaaaaat aacatagggg cctggtgttt |
| 260701 | ggaagatctg gagtttggaa tgccagcttg tcaagcacag atccctgcct accaaaaagc |
| 260761 | atgtgctggg aactcacata cacaccaacc agcacaagaa ggtcacagat gagcaaggtg |
| 260821 | cctgttacct accaccctga caacagtgtg tcaggccaac ttggaggaca aactctcagt |
| 260881 | cctcagccac tttggtctaa aggacttcca agccctcttc tagctgtgga aagggcagag |
| 260941 | ctcatccagg aaagaagtag tctccttccc cttagaggag gtagccatga atggaattgt |
| 261001 | gggctgagtc cagtcacctt acagagacac ttcacctctg tgtgctgtgt ttctacatct |
| 261061 | gtgaacttct tgttctttct cagaaggacc caatatcagc accaattaaa tagtatgcaa |
| 261121 | taagctgtgc tcctggacaa agcatgccat agataaatct ttcttgaaga ctctttaaca |
| 261181 | catttgttct atgagtaaaa caataaattg ataaaaataa taatgccata gatttctaga |
| 261241 | acttctttct tctaggaaaa ccagtgcttc tcctacttat catttcattt ttttaaagat |
| 261301 | gccagtgtaa ggaaaatatt ggctagtgtg tctcctcatt ttacagatgg aaaaacaggg |
| 261361 | tcactgcaaa cacccattaa aagggtaacg aggctgggca cagtggctca tgcctataat |
| 261421 | cccagcactt tgggaggctg aggcaggtgg atggcttgag gccaggagtc caggaccagc |
| 261481 | ctgggcaaca tggcaaaacc ctgtctctat ttgtattagt ccactttcat gctgctgata |
| 261541 | aagacatacc caagactggg aagaaaaaga ggtttaattg gacttaaagN cctcagaatc |
| 261601 | atggcaggag gtgaaaggca cttcttacat ggtggcagca agagaaaatg aggaagaagc |
| 261661 | agaagcagaa accccagata aacccgtcag atcttgtaag acttactcac tatcacgaga |
| 261721 | atagcccagg aaagaccagc ccccatgatt cgattacctc cctctgggta cctcccacaa |
| 261781 | catgtgggaa ttctgggaga tacaattcaa gttgagattt acgtggggac acagccaaac |
| 261841 | catatcattc tgcccttggc ccttccaaat atcatgtcct cacatttcaa aaccaatcat |
| 261901 | gccttcccaa aagtccccca aagtcttaat tcatttcagc attaacccaa aagtccacag |
| 261961 | tccaaagtct catctgagac aaggcaagtc ccttctgcct atattctata aagtcaaaag |
| 262021 | caagctagtt acttcctagg tatgcaattc caagtgggag aaattggcca caacaaaggg |
| 262081 | tttacagSgc ccaggtaggt ctgaaatcca gcaaggcagt caaacattaa agcttcaaaa |
| 262141 | taatctcctt tgactccagg tctcacatcc aggtcacgct gatgcaagag ctgggtcccc |
| 262201 | atggtcttgg gcagctccgc ccctgcaaac acccattaaa atggtaatga ggctgggcac |
| 262261 | agtggctcat gcctgtaatc ccagcacttt gggagggtga ggcaggccct acctccactt |
| 262321 | tgcagggtac agcctccctc ctgcStactt tcacagtctg gcattgaRtc tctgcagctt |
| 262381 | ttccaggcac atggtgcaag ctgctagtgg atctaccatt ctggaatctg gaggatggtg |
| 262441 | gccctcttct cacagctcca ctaggcagtg ccccagtagg gactctgtat ggaggctcca |
| 262501 | accccacatt tcccttctgc actgccctag cagaggttct ccctgagggc cccgcccctg |
| 262561 | cagcaaactt ttgccagggc atccaggcgt ttccatacat cttctgaaat ctagaaggaa |
| 262621 | atcccaaacc tcagttctag atacctgtgc accctcaggc tcaacaccac atagaagctg |
| 262681 | ccaacgcttg gggcttccac cctctgaagt cacagcccga gctatatgtt ggcccctttc |
| 262741 | agccacagat ggcccctgga gcatctggga cacagggcac caagtcccta ggctgcacac |
| 262801 | agcatggaga ccctgggcac ccacgaaact tcttttacct cctgggcctc caggcctgtg |
| 262861 | atgggagggg ctgccgtgaa ggtctctgac atggcctgga gacattttcc ccagggtctt |
| 262921 | gaggattaac attaggatac ttgctactta tgcaaatttc tgcagccgac ttgaatttct |
| 262981 | ccccagaaaa taggtttttc ttttctatca cctagtcagg ctgcaaattt tccaaacttt |
| 263041 | tatgctctgc ttcccttata aaactgaatg cctttaacag cacccaagtc acatcttgaa |
| 263101 | tgctttgctg cttagaaatt tcttccacca agctaccaat gactttcttc acggaattgg |
| 263161 | aaaaaactac tttaaagttc atatggaacc aaaaaagagc ccgcattgcc aaggcaatcc |
| 263221 | taagccaaaa gaacaaagct ggaggcatca tgctacctga cttcaaacta tactacaagg |
| 263281 | ctacagtaac caaaacagca tggtactggt accaaaacag agatatagac caatggaaca |
| 263341 | gaacagaggc ctcagaaata atgccgcata tctacaacta tctgatcttt gacaaacctg |
| 263401 | acaaaaacaa gcaatgggga aaggattccc tatttaataa atggtgctgg gaaaactggc |
| 263461 | tagccatatg gagaaaaatg aaactggagc ccttccttac accttatact aaaattaatt |
| 263521 | caagatggat taaagattta aatgttagac ctaaaaccat aaaaacccta gaagaaaacc |
| 263581 | taggcaatac cattcaggac ataggcatag gcaaggactt catgtctaaa acaccaaaag |
| 263641 | caatggcaac aaaagccaaa attgacaaat gggatctaaa taaactaaag agcttctgca |
| 263701 | cagcaaaaga aactaccatc agagtgaaca ggcaacctac agaatgggag aaaatttttg |
| 263761 | caatctactc atctgacaaa gggctaatat ccagaatcta caatgaactc aaacaaattt |
| 263821 | acaagaaaaa aacaaacaac cccatcaaca agtgggcRaa ggatataaac agacacttct |
| 263881 | caaaagaaga tatttatgca gccaaaagac acatgaaaca atgctcatca tcactggcca |
| 263941 | tcagagaaat gcaaatcaaa accacaatga gataccatct cacaccagtt agaaWggtga |
| 264001 | tcattaaaaa gtcaggaaac aacaggtgct ggagaggatg tggagaaata ggaacatttt |
| 264061 | ctcactgttg gtgggactgt aaactagttc aaccattgtg gaagtcagtg tggcgattcc |
| 264121 | tcagggatct agaactagaa ataccatttg acccagccat cccattactg ggtatatacc |
| 264181 | caaagggtta taaatcatgc tgctataaag acacacgcac atgtatgttt attgcggcac |
| 264241 | tattcacaat agcaaagact tggaaccaac ccaaatgtcc aacaatgata gactggatta |
| 264301 | agaaaatgtg gcacatatac accatggaat actatgtagc cattaaaaat gatgagttca |
| 264361 | tgtcccttgt agggacatgg atgaagctgg aaaccatcat tctcagcaaa ctatcacaag |
| 264421 | gacaaaaaac caaacaccac atgttctcac tcataggtgg gaactgaaca atgagaacac |
| 264481 | atggacacag gacggggaac atcacacacc ggggcctgtt gtggggtggg gggaagggga |
| 264541 | gggatagcat taggagatat acctaatgtt aaatgacgag ttaatgggtg cagcacacca |
| 264601 | acatggcaca tgtatatata tgtaacaaac ctgcatgttg tgcacatgta ccctaaaact |
| 264661 | taaagtatga taaaaaaaaa aagaatctag aaaaagaagt acaaattcaa cctaaaacaa |
| 264721 | gcaggagata ggaagcatta taaagattaa agcagaaatc aataagaaaa aaaaaaaaag |
| 264781 | aaatttcttc caccaagcca ggtggagtgg ctcacaccta taatcccagc actttgggag |
| 264841 | gccaagatgg gcagatcacg gggtcaggag ttcaagacca gcctggccaa catagtgaaa |
| 264901 | ccccgtctct attaaaaata caaaaaaatt agccaggcat ggtgatgcac acctatagtc |
| 264961 | ccagctactc gaaaggctaa ggcaggagaa tcacttgaac ccaggaggca gaggttgtgg |
| 265021 | tgagccaaga tcctgacact gcactccagc ctaggcaaca gagcaagact ccgtctccaa |
| 265081 | aaaaaaaaaa gaaaaagaaa gaaatttatt ccaccagata acctaaatca tctctctcaa |
| 265141 | gttcaaagtt tcacgaatct ctaggggagt ctctagggga gggggcaaaa tgccRccagt |
| 265201 | ctcttcgcta aaacataaca agagtcacct ttgctccagt tctctacaag ttcctcatct |
| 265261 | ccatctgaga caacctcagc ctggatttta ttatccatat cgctattagc atttgggcaa |
| 265321 | agccattcaa caagtctcta ggaagttcca aactttccca cattttcccg tctgcttctg |
| 265381 | agcctttcaa actgttccaa tctctgcctg ttgcccagtt ccaaagtcac ttccacattt |
| 265441 | tcgggtatct tttcagcaat gccccactct attggtacca attactgtat tagtccattt |
| 265501 | tcacacagct gataaagaca tacctgagac tgggaagaaa aagagtttta attggactta |
| 265561 | cagttccacg tggctgggga ggcctcggaa tcatggcagg aagtgaaaga cacttcttaY |
| 265621 | atggcagcag caagagaaaa tgaggaagaa gcaaaagctg aaacccctga taaacccacc |
| 265681 | agatcttgtg agacttattc actatcacaa aaatagcatg ggaaagactg gcctccatga |
| 265741 | ttcaattacc tccccatggg tctctcccac aacacatggg aattctggga gatcaatgca |
| 265801 | agttgagatt tgggtgagga cacagccaaa ccWtatcact actaaaaata caaaaattaa |
| 265861 | ctgggtgtgg tggtgcacac ctgtggtccc agccacttgg gaagctgggg tgggaggatt |
| 265921 | gcttgagcct gggaggtcga ggctgcagtg agccatgatt gcgccactgc attccagcct |
| 265981 | gggcaacagg gcaagaccct gtctcaaaaa aaggatattg tgtgccgact ctactaagca |
| 266041 | ctttacatac attaacttgc ttaattcttc caacaacccc ataaagacaa aaactattag |
| 266101 | tcctacttta catatgagga aactaaggca tagatgttag gaatcctacc caaggccata |
| 266161 | gggcttgaac ttgaacccaa actctctggc tccagaggct gcacccaagc cgtgggtcac |
| 266221 | acagcaactg ctcccagcct cctgctcccc accatggagt gtctgagctt acaaagtgtg |
| 266281 | caaagcttac aaagtatgca aggaacgaac cctaaggact tgtgtaaccc ccagcctccc |
| 266341 | cgtgaaaact aggcccaggg catttctgga aggaagtggc cagcacRcag gtagacagct |
| 266401 | gcagcagtgg caggggtgtc tgggtgggaa ccaggcagca ctaccatcag aataaaccac |
| 266461 | cccgatcccc ctaggaggaa acccactgtc ttagagacct gcagcctcac tctcccctat |
| 266521 | ttgaatcatg aaactaatcc tcagggcacc atgctttaag ctacacaggt tggcatttac |
| 266581 | attttcctcc ttggattgga tttatatatt ttatttacat catttattgg ttgttgttga |
| 266641 | agaagaagaa gaagaggagg aggaggaaga gaaggaggag aaggaggatt aaagtacaga |
| 266701 | aagggaagaa gtcatttggg tccactgctc aggtgggctc tgcccacaag tctgcccagc |
| 266761 | gttgcaaatc ggcccttgca gctggacaga gctggcctgt agctgacagg attgatggct |
| 266821 | cacaccagtg tgggccccac agggtgtctc cctcacccca cccctctggg tggtcccctg |
| 266881 | gaaagtatcc aaaatgcata acaaatgaaa ccaaggacgg ggtccagttc aaccccttag |
| 266941 | tgagagggaa gactggagac agacaatccc ccttgctgga ggacacagga tgaccacccc |
| 267001 | accctccccc tggagcctct cttttggacg atgaggagta tgagtctccc caaacagtga |
| 267061 | ctgccaaacc gggactctgc tcagaccaac ctggcccagg cttatttctc atttttccct |
| 267121 | tctgttcacR gacacecccc acctactccc aaccagccaa acagatctgt gtgctctcct |
| 267181 | ccatgcagtc cttcccatct ggccttcctt ccctcagaaa ggaagggtgt ccccaaagga |
| 267241 | atcgctcaaa cgcctcacgt ctttgttcac ttccctttgg tgactaaagt tccccagcct |
| 267301 | caccctcccg agcctaacca gaccccactg tccttctgaa ctcagctcct ctctgaagca |
| 267361 | tcctctgtca tcccagccac aggaactgct gtctgtcttc caatttcaag gacccctggt |
| 267421 | ggcctaggct gatcgtttag cgcagctatt caccacctgg aacctcaYgt gaagcagctt |
| 267481 | ctctcaggaa tgcatgctct gctgcctgta agctttgtcc ttttcctcct tccctctccc |
| 267541 | cactcccata ttcatgagat tgagtgggcc ctccttgggg acaaagccag aatactcttt |
| 267601 | ccttcYtttg tgccccttca gtgctttttg atcaaggtgc aattcatgga ggaaaggaga |
| 267661 | aagacgtaaa tagtgaatga aggaggggac agggatcaga aggaaaccta ggctggaggt |
| 267721 | gcaaactcag ggctctgagg gccttggggc agcttagctc ttagtcaaga aatgaaataa |
| 267781 | gcagcagaaa gcaaaagaaa aaggaaaggc tttccagcgg gctttttctt cccaaggatt |
| 267841 | tgaaaagcta cagtagagcc tggaggagag tgggctgtcc agggctgccg gctctgagtt |
| 267901 | ttggagagag gtggagatgc tgtggagctt ttatactatc cagaccagtt cctctgggca |
| 267961 | gcaaaggagg cacacaccca ggacaatgtt gggcaataaa gattattcca tcatttggga |
| 268021 | gcaggagcgc cttttgttct gcatttctca gggaatcaac acattccaag caggaaaggg |
| 268081 | atgagaacaa atgaccagca ggatggggac tgatagtatt gggtcctctt cattcagcag |
| 268141 | attataaaat aataaaacaa gcatcctact gctgcaagga tagcaagagc tagcaaggtc |
| 268201 | tcaaaaaggt ttcagaattc agactcacaa gccaggcagc ctccatctct cctctgacac |
| 268261 | tcgctgggat cttcagcccc tgagatgaca aacaatgtcc ccctggtgtg ctctggactg |
| 268321 | aggaactatg agaacttcct aaatctcata aaactataga ttagcgttca tccctgctac |
| 268381 | cctgtgcata agtgacctaa aattgaatgg tccgaacctg tttcccatcc cccagagaca |
| 268441 | tgtgtaatta gataaaatga ggacagaata tgtataagta tctgttatac tcagatggct |
| 268501 | gcccagaaag aaaatgagtg ccaggaaccg gacagccctg tgtcaccctc tgtcctgaac |
| 268561 | tgggattgag ggagacttac ctttgtgagt aggttgctag tgcaatatga cctctctgag |
| 268621 | ttaacgaata tttttctaca attcggctcc tgcagcccat atttggcaca ccatcagcat |
| 268681 | tttctctggc tttccatgtt gaaggatgtc tttcagacca ggatctgaac tgaaacttga |
| 268741 | ccctgggagt ccgtgtccac cttgggactt cctcttcctc cttcaggcct ctttctggtg |
| 268801 | gtaccctctt ccaaaaagcc cccaacacag aattatttgg aggacataca aaagttaYaa |
| 268861 | tgatacgctg gtatctctat ctctctcaat acaagagaga aaggccctca cttgagccct |
| 268921 | aggccatcct ttttgaagga tgaatgaagt gatctgctat acttggttgg gacacagagt |
| 268981 | cgtagggaaa atcattctct ctctaggcat tgatactgtg aaagtataca aaaggcattc |
| 269041 | tctcaaagaa gatgtatcca aaaacagtga ctggactaaa gctccatgga acagacagca |
| 269101 | gatgttcacc agaacccagc cttgggttta aaccattaca gtgctttgca tcttctggtc |
| 269161 | ttctctatct taaaaactca aaagaaaaaa gaRtcctcca gtataaataa agctaaagga |
| 269221 | aatcccacac acagctaagc atagaggagg cactgaataa aaatgaagtt gatttatcag |
| 269281 | tggctatcca taagccagag gttacttact cccctgaaag aaagcaaagc aaaaaggttt |
| 269341 | gtctttattt ctcaagacca aagggagaaa gccaagcttt ttaaagtgac caagaaacaa |
| 269401 | gaggctagaa tgagcgaggc tgccacatgt cataaatgca catcctacat gcaagcaagg |
| 269461 | ccaaacctgc atctgtttcc caactcctga aactgaaggc tctttgggga ggaattctgc |
| 269521 | ctttttcaga ttcctgccgt gaaggcagag aatgagaaac atgtcaactt tctagagtgc |
| 269581 | taaaagcaaa cttgggcagc agagcagggt atctgcctgc aggcttcgct cactcaacta |
| 269641 | ttccccacac gtttcctacg tgcctgctag gctaggtcct tgggacagaa aggcacatgt |
| 269701 | ggccaggctt ggtggctcat gcctgtaatc ccagcacttt gggaggccga ggcgggtgga |
| 269761 | tcactggaag tcaggagttt gagaccagcc tggccaacat ggtgaaacgc catctctact |
| 269821 | aaaaatacaa aattagctgg gtatggtggt gtgcacctat tgtcccagct actcaggagg |
| 269881 | ccgagatagg agaatcgctt gaacccagga ggtggaggtt gcagtgagcc gcaccactgc |
| 269941 | actccagcct gggtgagaca gagagagatt ccatctccaa aaaaaaaaaa Raaagaaaag |
| 270001 | aaaggcatat gtggctactg tccctgcctt ccacgccctt actgctaact aactcctgtc |
| 270061 | aattatttca gtgactgaga gagaagagta tgttcagctc tgcatggccc agggcaggtg |
| 270121 | tggccagttc tacctgaggg tcagcaaggg ctccaccagg gagagggacc acttaaacca |
| 270181 | tccagaagat gacagatgtg catcaagtgc gcccagggac agggtggagg tggaggacaa |
| 270241 | tcaaaccgcc tgcccagagg aaaccgcctg cccagaggag ccacaagcag tttgctcaga |
| 270301 | caccagggga atgtgtgaca agagtcgtct ctctgggcag ggacacagag catcccctca |
| 270361 | gactaacaag ttcacacacg tctctcacac tgaggttctt accctagagc ccatgggcct |
| 270421 | ccagggcatc cagagatggg ctcttccagg tctgtgaacc ccataaaacc ataggcagat |
| 270481 | gttcacatct atatgcgtgt tttccgggga gatgatccac aactttcata ggattcttga |
| 270541 | aagggcctgt gattgccaaa gaaaggtgaa aaagaaacac ccatcaagac tgagtagcct |
| 270601 | gcacactaga ctgtggtata gaatccagtt tctccctgtc tgtctcctgc atatggctca |
| 270661 | gtaacagaca tagtaagttt tcagaactag cagaactaaa gggatgagaa gagcattcca |
| 270721 | gtataagcag atggaaagaa attaccattg gcatcaccaa aacaaatacc tgtgtgtact |
| 270781 | gactgtgtgc caggctctgg gctagacttt aaaaaccagt atctctttcc ataaagccac |
| 270841 | atggaagagt gtcttctcag cctcctgttc ctggagccaa tattgcatat tggagtccct |
| 270901 | aaatgtggat tcaagtcacc cagagcaatt cactgcaatc gccagatcag gctcaaactt |
| 270961 | tagttggcag ttgcctagca acgagtaacc ctgaagacac atcaccaaac ccagatgcca |
| 271021 | aaaagggcat tttgtggaca agctagttct gaaaccagcc cctcataagt ctatttgtca |
| 271081 | ggcctccctg gggctgttgg ggtaaggagt agactttgca gccaaaggta ggctgagagg |
| 271141 | agaaagatag aaaggcattg ttttttgttt tttcagacac ggtctcactc tgttgcccag |
| 271201 | gctggagtgc agtgacacaa acacggctca ctgcagcctc aacctcttgg gctcgggtga |
| 271261 | tcctcccacc ttagcctccc aaataactgt gactaaaggc gcgtgccacc acacccaact |
| 271321 | agtttttcta tgggattttg ccctgttgcc caggctggct cgaactcctg ggctcaagcg |
| 271381 | acctgcccac ctaggcctcc aaaagtgctg ggattacaag tatgagccat tgcacccagc |
| 271441 | tggaaagtgt tctgctggtt gtatgttttc ccacctctag ggaataggca tgagaagggg |
| 271501 | aactgagggt taaaggagaa ggcagcctcc agtggagaag gcagcctcca gtagagaagg |
| 271561 | caattggtgc ctcttcactt cctctttcag attgtaccta tggttactct tccaagaagt |
| 271621 | tgcttaacag atgccaccca cacctaaaga cgcataaagc agcaggaaga cttgactgaa |
| 271681 | cgtacatcca gtccttccct aaagccatca tcctcctgca gctccaaaaa ccccactgaa |
| 271741 | ctatggaagg ctggggtgag caggatgata gacctcaaac tacttcaaca agtgaaactg |
| 271801 | gggaagcagt ttttaaccaa ctctccaagg caactcactY ccttacagag gcatgaaaga |
| 271861 | ggcaaagaga tctcattctc taaaattcag agctgttgtt gttgttgttg ttgttgttgt |
| 271921 | tgttgttgtt gttgctgttg ttgttgtttt taacacaaag ctcagaaact ccttaagcta |
| 271981 | agaggcaggt gagactgggt ttcccaagac aaagtttcca gtccaaacca tcacataagg |
| 272041 | ccaacactgg gtattctccc tgtgtcgata gtgggaagcc tgggaagacg gccttcttcg |
| 272101 | gaatccaccg tcccttccct tgaaaggtct tgggggtagg aggaaaaggg gcaaataaat |
| 272161 | atatcagtct ggaggtgatt caggaagaac aaatgcggat gtcaaacaac aaataaggca |
| 272221 | gatataaatc caaataaaat attaaaatca ttaaagggct gctgctccct gaagattggg |
| 272281 | aaaaatgaag agagttaatt aaaagcaatc tccatgcact gctgagccgg ccagccctga |
| 272341 | taaatcaaca gctggggctg ctgtggaggg caggcaaggg gcttcaggag ggggtgggcc |
| 272401 | agctggggga agggggtctg ccactgagat ggctgtgatg gcaaattgaa cacagtgact |
| 272461 | taagtttcat gttttattaa atattttatg accactgaat aaagttattc tttggagagg |
| 272521 | gagaaaatga tgagctgggt aagtgaaggg ggggaagata aggatgaaga ggtattgtct |
| 272581 | gattcaaaac aYacttagga ctgtgacgtt ggaacctctg atatcgcccc caaaggccga |
| 272641 | agctttgggt tttttttctt tctacttgat ctgcaaaggt agctgtgtct tcgtcttcta |
| 272701 | aaatctctct acaaaacttg ggttatgttt atctgaggga ccagggaagg cagtgcagag |
| 272761 | tcagggaaag taatgaagag gaagaaaaga cagaaaagat cctcaaaatt gtcattgctg |
| 272821 | atcaaagcca gacttttaac acaaaactaa aaggtcagca gaaatggtgg gaactctttt |
| 272881 | ttctttcttt acttctttcc ttctcccttt tttctgcagc tagtttttgt gtgtaaaatg |
| 272941 | aaaaagagct ccaaattttg gggctcaatc taagtcaaaa gccagctatt tcagaagtgt |
| 273001 | tagaagaaca ggcccttctc tattctaagg ggaaaccctc cagttcttcc ttgatgaaaa |
| 273061 | tataatcaag agaaatgatt gggggaaagt gtttttttct cctccataga actgggattg |
| 273121 | gaaggggagt gtgtgcatgg ggaaacataa ggaattatgc atttggatat gcattttaat |
| 273181 | taggtggaca gaagcagccg cctgttaatt tttcttgctt gtttccactt agcattcatc |
| 273241 | acaggcagaa ctaccataga gcgctcccac gataatagat ggttctgcat tggctaagtc |
| 273301 | ctcagggaaa ataattagca ggagagaata tattctctcc cctcccactg ccccatccac |
| 273361 | cctgccctcc ccctatcacc agcaccgcgt tgccgcccSt ctccccactc ccctcaccta |
| 273421 | tagtggtttt cctaggaaaa gccgagggca gcagtcagcc tcctggtttg ctagcactta |
| 273481 | ctttgccctg ccaaaaaaca aggRtctagg agaagaaaca gacagatcag aagtctctat |
| 273541 | tggagtggaa gctcctcgat gtagggaggg agtcaggtgg ctgtgctgat tagttctcag |
| 273601 | gggcaggcag gcaatccatg ttggttgtgg gatgaaggaa ctccaaagag gatgagagag |
| 273661 | ttctcgttgt gctcaactgg cagccaaaga tgtatcgaga gttgctggtt gaggacagca |
| 273721 | ggagtaggga tgatgttttt tgcttcattt gctcttgtaa aggaaagttg cagggccaag |
| 273781 | taagtgcagt ggttttcacc tgcaatccca gcattttggg aagctgaggt aagaggatca |
| 273841 | cttgaggcca gaagttcaag accagcctgg gcagcacagt gagaccccca tctctataaa |
| 273901 | aaaattaaaa attaagtgtg gcagtacgca cctgtagtcc cagctacttg ggaagctgag |
| 273961 | gtgggagatc acttgagtca aggagtttga ggccacagtg agctgtgatg gcaccactgc |
| 274021 | actccagcct gggtgacaga gtgatcgcaY tactgcactc cagcctgggt gagagtgaga |
| 274081 | ccctatctcc aaaaaatata tgagaaaaga aaataaagaa agttgtagct ttgcagcaag |
| 274141 | actgaatctg aaccacttcc aaggctggca accaagacat gYatgtaact ctgagatctg |
| 274201 | accccaccgc aatgctctct ggtctacttt tctataaaga atctggcctg gcatggtggc |
| 274261 | ttacgcctgt aatcYcagca cgtggggagg cccaggtggg cagatcactt gaggtcagga |
| 274321 | gatcgagacc agcctggcca acatgataaa acccgatctc tactgaaaat acaaaaatta |
| 274381 | gctgggtgtg gtggcatgtg cctttaatat cagctactcc tgtgtctgaa gtacaagatc |
| 274441 | acttgaacgt gggaggcaga ggttgcagtg agccaagatc acgccactgc actccagcct |
| 274501 | aggegacaga gtgagactct gtctcaaaaa aaaaaaaaaa agaaaaagaa aaagaatcca |
| 274561 | ttcttgccac tgacctccaa tgccaacagc tcactctcct tattcacaag cagatctaag |
| 274621 | cccctgcccc gcctccactt cttctctctc cctcagtcat ctcagttgaa ggaggagcca |
| 274681 | gagaccaggc aaggaccaaa ggcccaagtt cccagaagag caccccactc taccaaccgc |
| 274741 | gcttctgctt cctctggttt ggtgggtgaa ctcaggtcag ggctatgacc ggaaatgaaa |
| 274801 | tgagggtttc ccctgagctc acattctcac ttatttcaaa cccagacaat aggaaaatcc |
| 274861 | cactgagatc ccagggctat ttacacagcc tggatgagta gaccttgcat ttcctgagaa |
| 274921 | acaatgatta gatgtgatgg gtaatgccag aaacatttat ttttgtttta atatttaaaa |
| 274981 | taatgtttaa tatagtaggt attattgact gcctgaggag gccatgatca gctacaggaa |
| 275041 | acttttagtt ctcatagtaa cacctcacat ttgcactttc caccttctga aatgtttcca |
| 275101 | catccattat ttcatgtggg ccgctgcggg gaagccaggc tggaggaagg ggaagggagg |
| 275161 | agaagggaga cacaagctct cctggctgtt tggaaggaca ggcctgactt gctaactcct |
| 275221 | gccccccaag ctatcctgtc atcaccgtgc ttccacccac ctcctgttgt cagacatcac |
| 275281 | atctccatcc acctaggaag ccttcactcc aagcctcacc aggtaactgc tagtgctaca |
| 275341 | gcccctggaa ctgcctcaaa cccaaaccct gacccccacg aggagtccct gccctcaaag |
| 275401 | gaagggggat ataggctggg cacggtggct cacgcctgta atcccagcac tttgggaggc |
| 275461 | cgaggcgggc ggatcacgag gtcaggagat cgagaccgtc ctggctaaca cggtgaaacc |
| 275521 | ccgtctctac taaaaatact atatatatat atatatatat atatatatat tagccgggcg |
| 275581 | taaggcgggc gcctgcagtc ccagctactc gggaggctga gcccggggaa tggggaatgg |
| 275641 | cgtgaacccg ggaggtggag cttgcagtga gccgagatcg cgacactgca ctccagcctg |
| 275701 | ggcgacagag cgagactccg tctcaaaaaa aaaaaacagg aagggggata tgaggggaag |
| 275761 | gcaatccctg tggctgggga tgggagaatt gagtctctgg gttcctagtt cccagtgtgt |
| 275821 | ttatcccaga acgcaatgga ctaccaatag agggagaggc agagaggttg aattctgtaa |
| 275881 | tactattagg tttgggtttt tttgtttgtt tagtttataa ggtggagaat gcctatatta |
| 275941 | tctagaaatg tagccgctaa ttttttgggt ttgtttgttt gtttgtttgt ttgtttgttt |
| 276001 | gtttgttttt tgagataagg tcttgctctg tcacccaggc tggagtacat ggagtacagt |
| 276061 | agcgtgatca cagctcactg cagcctcaac ctcccgggct caagccatct tcctgcctta |
| 276121 | gcctcccgag tagctaggac cacaggtgta caccaccaca cccggctttt ttttttattt |
| 276181 | tttgtagcga cagggtctca tgatatgtcc aggctggtct tgaatgcctg agctcaaggg |
| 276241 | atcctcctgc ctcagcctcc caaagtgcta agattacagg catgagccta gcYtagtccc |
| 276301 | tagattttac agtccaaaaa tgaaggagac ctaggcatag tgaaaaccca aaagaaatga |
| 276361 | aaatggggac tcaaaaacag ccaaaaggtg aaacaaccca aatgcccatc ggcagttaaa |
| 276421 | caggtaaaca aaaagtgggc tatccataca atggccatag aaaggaatca agttctgact |
| 276481 | atgctacaac atggatgaac aaacattgaa gacattatgc taagtgaaat aagccagaca |
| 276541 | cagaagaaca aatattgtat gtttcccctg atatggggtg ctaagaatgc agaatggtgg |
| 276601 | ttcccaggga tggtaggaag caggggatgg aaaagtattg tttaRtgcat acaaagtttc |
| 276661 | tctccgggat gatgaaaagg gtctgggcag ctgggcacgg tggctcatgc ctataatccc |
| 276721 | agcactttgg gaagctgagg cgggtggatc atctgaggtc aggagttcga gacgagcctg |
| 276781 | gccaacatgg tgaaatgctg tctctactaa aaatacaaaa attagccagg tgtaatggcg |
| 276841 | catgcctaca gtcccagcta ctcgggagac tgagacaaga gaatcacttg aacctgggag |
| 276901 | gcggaggttg cagtgagcca agatcgcgtc actgcactcc agcctgggtg acagagegag |
| 276961 | actccatcta aaaaaagaaa gaaagaaaag ggtctggaaa ctgatggtgg tgatggttgc |
| 277021 | acaaggtggg aggatccctt ggggccatga tttcaagacc agtctgagca acatagcaag |
| 277081 | acctccatct ctactaaaga ttagaaataa atgtacttaa tgccactgaa atgcacactt |
| 277141 | taaaatggct aaaatggtac actgtRtgtt atgtatattt tagcacaata aagaaaaatt |
| 277201 | gagggaatgc ctctctctgc tggaggtcag ggtgaccatt ttgttttctc tttaaagtct |
| 277261 | cagaatttac acaccagctc ctgtgtagac tctgatgagt tctgcaacct cctccccctt |
| 277321 | ctctttatgc ttgcaaaaaa actgccatgg aagctttcca ccaaagaaaa gcctgataat |
| 277381 | aatgtcccca ctgaaatctg agatgttctg gagacatgtc actgaagggg aggcatgaag |
| 277441 | tccagtctag tcttggctaa tacccactca ggtaggggct agttccacac aactgctggg |
| 277501 | cacctccatt tcctcagcag taacacaggt atgctagagg aagctcagtg agacatcagt |
| 277561 | acaggtccac ttacttcagc tcactaaaca tccaggtatc tgtggctgcc caaattaaaa |
| 277621 | taaaataagc actttatttt cagattaatt gggataggtg ccatggtaga ggagaaggcc |
| 277681 | agagagatca tggacaaata aagtccagac cggaggactg gctggaaaat tggttaccct |
| 277741 | tctgcctcca aacacacaca cacacacaca cacacacaca cacacacaca cacacaaaag |
| 277801 | gaagcaaaat acagatgttc tcagtgattc cagtctttta accaccaaaa actgagtgct |
| 277861 | tatccacgtc aaaataggcc aattggtctt caagttcctc attctcatca gcttctggat |
| 277921 | gggatgctag tgagaagaaa atcactgaaa aggaagagcc agaggaaaag cccacattct |
| 277981 | aaatggccca ccacctggtc ctcagcctca gaccttgaga agggatagga agttccaccc |
| 278041 | agcttagaac cccaagaagg gagcaccatg tagcaagact gaatcagaga ataagaaact |
| 278101 | gtggaagtct ccagtcttaa atgttctctt tagagccaca ctttaaaaat aagaaaaaat |
| 278161 | cagaactctg gcccctagct gtcctctctg tcctaatcca ccataataag agccagaaag |
| 278221 | ttgttggctt gaaaggaatt tggggaatca aagtacatca ccatcataaa gacaaggaat |
| 278281 | atgcggctcN aagttctgtg tcccagatca caagctagtt gcctgtagct ctggaagcgg |
| 278341 | agctcaaggc ttgggattcc tctcccagag ctttttctcc tccattactc tgaagtcact |
| 278401 | aaggctacaa aaaatcagcc actggtgaga aatgaacatg gaagaggaaa agaggttgag |
| 278461 | acgggtttca tcaatagcag gtgaaagtgt gaggatggga aaaactttct ggtggagctt |
| 278521 | ccaagtgcag atcattcaaa cagcagattt tcaaggtgaa taacaacaac taaaaaaaaa |
| 278581 | ccttttatca gcaacctgag atgatcacag tccccagatt cagagaggga ggagagggtg |
| 278641 | caaagKgggg attagacatg tgccagcatt gttccgcagg ctcagaactg aggcctggct |
| 278701 | ggtgaggact caatgcgggc tatttgaacc ccattattag gagctctgaa cctaatcctc |
| 278761 | tcacccctcc ctgcttccac acattgcccc taaattgtaa cctcttcagg gattctctcc |
| 278821 | cttcccttgc cactgcctgc cacactaata ttcacaaaca cacagcctag aaattctcca |
| 278881 | gtctgctcct cttccctctg ccccaccaac acctcctaac cactgctttt aaaactctaa |
| 278941 | tgcaaatcac aggcttcaaa aaccttccct cagtgacagt tttacgatgc tagctccatt |
| 279001 | catccatatg gtttgacaga cYgtgaaaca ccagtaaccg gaccaataag aaaaacaaat |
| 279061 | tacaaaaaca ctRcaacacc tcatctctcc ccagtcactc aaacaactag aaaactttgg |
| 279121 | aatttgcaat ggatcacaat atcagtctct cttgcagttc aacaacaatc tttgcagagt |
| 279181 | tccataccac acagtggttt tacccactcc tccatcctcc ccctacccaa ggccactctc |
| 279241 | catctttcct tgttaactac cttcatattt aaagactatt taaaattagg gccatgctta |
| 279301 | caaattcccc tgttgggtcg tagctgggca aaaaatattt cagtggttgt gggatttttt |
| 279361 | tggccagagg tttgcaacat ttggctacat ttctgttttc tagtgacttt caaaacactc |
| 279421 | aaaaaccaca aaagttactt tgcagaggtt gggataataa acaggcctgg attctggtgc |
| 279481 | ctctttatga cccagccccc atcgccacta ctgtcagcat agctgcctta gaaaactgaa |
| 279541 | acatcagcct cagtttccat tctttttctg gtgcatgatc aaaacaaaac atgctgacca |
| 279601 | tgacatttta ttttttgcat tgatctgaac agatggctct gaaacagctt tagacattat |
| 279661 | ggtctttctc agatgtatcc aaattccagc tacctgcatg attccaaaaa gaggaggatg |
| 279721 | agaggtctcc aactcagctg tctctgaatt caagcccacc ttatgtgact aagcagctcc |
| 279781 | cattcaactg gcagtcttca atgtctcccg ggaggcctgc agaccaggct attttcagag |
| 279841 | gtttaccctg tgacaatgcc tccacttggg ttctcgcaga cattaatctc catcataggt |
| 279901 | gtctcatcaa aagcagacat ttacccattg aaaaataatg tgtgctaatg aggtttggag |
| 279961 | aatttagggc ttttttatag tggcaaccag aagcagatgg agaacaggtt cttgggaatc |
| 280021 | tgttggctta caacgtccga gggtcctttt tcataagaag ctaaaacaat gtccataaaa |
| 280081 | ggcagcaagt tcacaaagtc ccggcctcaa tgctgtctac ttagtaccta cccacatccc |
| 280141 | cccaacctcg acagaaagag ctaagaggag attagaacca ggaatgtgac ccccaccMct |
| 280201 | tcccctctga tatctaaact gagtgccaca gcaagagtga ggtctggctt ctaactttca |
| 280261 | catgcacaaa accactttag attagaatac actaatacag gtcatagaat gcacaaagag |
| 280321 | atctagattt gacgttcatc tacacacatg acctgctgtt tgacttggct aagtaagttt |
| 280381 | attttcttct cccagagtag tgttcttaac aacaaaacag ggacataaac acatacctcc |
| 280441 | aagcaaggtt aactccttac aaaagaaagt ttcaatacaa tcacgtatat gtgtgtgttc |
| 280501 | acagttataa gcatgacaaa atagtttatg ggtctcttta taaataatta cttaaggtaa |
| 280561 | agccctgttg gttcatatgg aatttaataa taataatttt tttctaagta ggcaattata |
| 280621 | ataatagaca tatatgtgta taatcaagtc tggcagaagg tggcagacat tctcagttaa |
| 280681 | atgcatacca accaggattt tgataataca agagtaagtt gtttaaagta ctgattgcag |
| 280741 | atttggggga aggtggttta tctgaactag aatattaaga ttcaaattta tattaaaagc |
| 280801 | attatgtggc cagacatcgt ggctcactcc tataatccca gcactttggg aggccaaggc |
| 280861 | aggcagatca cttgaggcca cgagtttgag accagctggc caagatggag aaaccccgtc |
| 280921 | tccactaaaa aacacaaaaa ttagccaggt gtagtggtgc gcgcctgtaa tcccagctac |
| 280981 | tctggaggct aaggcacaag aatcacttga acccaggagg cagaggttgc agtgagccaa |
| 281041 | gatcctgctg ctgcactcca gcctgggcaa cagagcaaca ccctgtctca aaaaataatR |
| 281101 | ataataataa taataataat agcattatgt ttcccaggta tgcaSaaatc aaccagaacg |
| 281161 | tgactaatct acatgcaggc ctttatcaaa tccatattta tgttacctgc atgtgtttac |
| 281221 | ttcactacct gggccttatc tcgcttgtat atgtaagaaa tgagggtaac tctcatacat |
| 281281 | ctttgctcag acaatgtagc tgctaaatta aataatatgt aatacacatt tacacatcat |
| 281341 | acatgtccac cagtgctttt gaattctatt tgtccagatg tgactgcttg gttgtggggg |
| 281401 | ccacctgccg tgtccccttt gtgatctgat cagtgcaggc ggctcctatt tctgcctcta |
| 281461 | acaccctgtt gggcagtaat aagatgttaa aggcgacaac agagagagaa gctgggctgt |
| 281521 | cagcttcaga gaggaagggg gtgaagggta caacaaggaa gaaaaagaaa gggagttgag |
| 281581 | gggagatcaa agacaggcag gaagaaagcc aaattgctaa gagaggagat gtggcttcag |
| 281641 | gagcttggga ccctaaggaa aaccccaaag caatgagatt caaaattgtg ccatcccatc |
| 281701 | accccagcta attgaattat tgaatgtccc acgtggaaaa agctagtaca gtgaaaaata |
| 281761 | gcccatactc agcgtaggca gagccctgca taggtgctgc tggaaatctg agcttgtttc |
| 281821 | ttcccaacac attaactacc accactttat ccccccatcc tgaggaaacc tttgtgtgac |
| 281881 | cattttctgt aggagacgtc cgtggtgttg gctttttttt ttttggaggg aagagagaga |
| 281941 | ctcagaacgc acacagagaa aatgctaatg tcgttcagct ctgtttcatt gtcaggaggg |
| 282001 | acacatgagg ataaaaacat agctctccaa accattctcc ccgctacccc tcctccctgc |
| 282061 | accaccacca tcccttcggc tggatgtgtc tctgcacttt gttctaattt atcccatgca |
| 282121 | taatttattc acgtgtgtat tgtttcctga tcagcaactt ttaaaaacaa atgaaatata |
| 282181 | taagatgttt tattaaacaa gttattttta aaaaaataaa ggcagatggt gtccctctcc |
| 282241 | caataacaac gtgtgtgctc ctgcgttagg agttgtcaaa aactgtccag ggtgtgagag |
| 282301 | gctgggctgg tcagtggtat tgtttatacc cctttactca cagggaaagg gtctgggaag |
| 282361 | cagaaaggaa tagctaatta taaatgacca agcaactccc acctagaaaa agcaagcagg |
| 282421 | ggcgttgtgt gtatgctagt gtctgcatgt gggtggcaac acaattacaa atacatcacg |
| 282481 | ttgcaactgt ttctaattat acaaagtaca attcagaact aattccacta accggccaga |
| 282541 | attccgccac cttctttccc gcgtctgtcc cttcccccac ccttaacccc accctacaca |
| 282601 | gactccctcc ccaaacacgc accctactgt gatccaaaaa accctggagc gagtNgggga |
| 282661 | acacaagctt agagatactg cgcccgcccg cgcgaaagcg ggctcccggg taactagggt |
| 282721 | acggctttcc caggaggaaa caaacctggt gcacatgtga aataggttct ctaacttgag |
| 282781 | tttaccaggt ggcatcagcc cggttatgtg atttcggctg gaaatgggga aactgMaaat |
| 282841 | cagttgtggg ttcggtagaa acagcatcag cggtgttgca gcgaaagcaa ccggcagcga |
| 282901 | ggatgcggcg aagttacgcc catttattct gccataaaac attttctttc ttgggtgaaa |
| 282961 | cgctgtggcg ttcaagcgca gtgtatccga gcttccgagc cagaactgaa gccaggagct |
| 283021 | cctatctgat cagcctcagc ttccaacgtc ctcttaacgg cagctttcat ataaatatat |
| 283081 | ttgaaacctg gggccttcct acccctttcc ctatttctga tgggcgacga gctggcgcaa |
| 283141 | acacgtccga ttctccctgt gcattccttt gcgttaggaa ccccctaccg tccccgggag |
| 283201 | cgaacctggt tttcaactcc aggagtggcc aggggtgaag acgagaatgc gctgaattaa |
| 283261 | aagaaccagg gtcgacagcg gccacgcacc agggagaatt cggcatgaac cgccccccac |
| 283321 | ccgacctgca cctccctctg ccacttcgcc tgcggcttcg tccgggcggg gaagtcccgg |
| 283381 | tcgaaggggt gaggaccccc cagcccacct cggatacgga gggagccacc ctctgccgac |
| 283441 | atcacccaat agcacccctt tcagagcgac actagttttc cgaggccacc cctggctccg |
| 283501 | cgatcgcgag cggacttggc ggcttaacag ttccacYgac tggaaggaag gaaggaagga |
| 283561 | aggaaggaag gaaggaagga aggaaggaag gaaggaagga aggaaggaag gaaggaagga |
| 283621 | aggatgaaaa ggaggaggaa ggcaggcagg cagaaattgg ctgttggacc cggggctggc |
| 283681 | ccccgcgagt cctcgcccgg cccgccccac tctgtccagg atctgggcaa gcgctcaaag |
| 283741 | tctccccgag gcggccagag gcacctgccc ctcgcccggc cgggagcaga cgctgccccc |
| 283801 | tcgggccagg agccccaaaa ccgcctctcc gcctgcctca gcgcctcacc cagaggtggc |
| 283861 | gagaacacca ttcataagac ctgcggcttc cctgcctcca aatccacccc aagttaaccc |
| 283921 | gagtcgttaa tccactaaag ccagctcgct cgcaaataca cgagcagaca cacgcKcgat |
| 283981 | cgcccggagc gcctccgaga tccgggggct gccggggaaa gcccggggcg accacctggg |
| 284041 | ccccagcacg cccgggaccc gctgcttccc ccgcggtgct ccaactccgg aaggtttgca |
| 284101 | caaactcccc gcgagcgatc ggaaggcgaa gagcgccctg caaactccRg agcctccgcg |
| 284161 | gtccgtccgc tggacccagc ggacccagcg gcggggcggg ggccgcgggc tcgggggcgc |
| 284221 | ggggctcggc caagtacacc gaggcggcca ctgcccgacg ctcgcccccc gcccagcagc |
| 284281 | ccccgaagcc gcgctccctg cccgcgaggc gggggactcc ggggaccgcg ccgtccccga |
| 284341 | gctcccgcga ccctcctgct gtagagcgct cgagcgccgg gcttctccgc ctgcaacccc |
| 284401 | tatatctggc tctctctgca atttagcaga acacaaatgt aacaattttc ttcttgttaa |
| 284461 | ttgcatctcc tgacatttct gcgcgttggg ggaaaaaaag aagatgaaga agtaagagct |
| 284521 | gaaagaagag agaagccccg ccgcggctgg aggcgcctgc aagcgcaatg ctctggcagc |
| 284581 | gctcgccacg cagaaggcgc cttttttttc atattgaaac cacgcggaat atgtacattt |
| 284641 | tttagtctta cttacgcttt cagggggttg tgaatgacag tcgccatttt gctacaatgt |
| 284701 | aacagaatat tgtctcagag ttctaaaggt tcgctcaggg gMagcgacgg gccaatcaca |
| 284761 | gcgcgggata ccggcccgcc ggccaatcgg cgctgctggt agctaggtgg gcggggcctg |
| 284821 | cgccgtggta gttattaggR gagctgtcaa agcccagagg tcactccctt ttgtagagcc |
| 284881 | cgagagccag caggtcttaa aggggcagta cMgcgctggt agctcctttt cgggctgggg |
| 284941 | aaagtggaga cgcacgggag agtattatag tttggtttaa ctccctactt ttctaaataa |
| 285001 | ctgcagaaga gtttgcgctc ccggacagaa atatttaaat attgccagca agccactgaa |
| 285061 | tcctattcat tagcctttgg ctttgcgtat Yaacattttt aatcccccaa agggtaaatc |
| 285121 | cccgtgtttc agtgcaaaag ttggaaggct gccgtttcgt gttaacaaat tactacatgt |
| 285181 | gctctgccgt ttgctaatgc tctgggtcct gccgcttttt aatattctta ttcccgaagt |
| 285241 | gttctcttta tctcggccac cttcctctct cgcttcttgg aactgtcgct gctgttcctg |

[0437] Following is a DPF3 genomic nucleotide sequence that includes the DPF3 SNP “DPF3-AA” (SEQ ID NO:).

AACGGCAGAGCACATGTAGTAATTTGTTAACACGAAACGGCAGCCTTCCAACTTTTGCACTGAAACACGGGGATTTACCCTTTGGG
GGATTAAAAATGTTGATACGCAAAGCCAAAGGCTAATGAATAGGATTCAGTGGCTTGCTGGCAATATTTAAATATTTCTGTCCGGG
AGCGCAAACTCTTCTGCAGTTATTTAGAAAAGTAGGGAGTTAAACCAAACTATAATACTCTCCCGTGCGTCTCCACTTTCCCCAGC
CCGAAAAGGAGCTACCAGCGCTGTACTGCCCCTTTAAGACCTGCTGGCTCTCGGGCTCTACAAAAGGGAGTGACCTCTGGGCTTTG
ACAGCTCTCCTAATAACTACCACGGCGCAGGCCCCGCCCACCTAGCTACCAGCAGCGCCGATTGGCCGGCGGGCCGGTATCCCGCG
CTGTGATTGGCCCGTCGCTTCCCCTGAG[C/A]GAACCTTTAGAACTCTGAGACAATATTCTGTTACATTGTAGCAAAATGGCGAC
TGTCATTCACAACCCCCTGAAAGCGTAAGTAAGACTAA

[0438] Following is a LOC145197 genomic nucleotide sequence (SEQ ID NO: 7).

| >14:99854151-99949200 | | | | | | |
|---|---|---|---|---|---|---|
| 1 | tccgtgttgc | tgcgtgagta | caatctctct | ctctctctct | cttttttttt | tttttttttt |
| 61 | ttttttaaaa | acagggtttc | actctgtccc | caagctggag | tgcagtggtg | caatctaggc |
| 121 | tcactgcagc | ctcgacctcc | acctccccca | gctcaggtga | ttcccccacc | ttaatcttct |
| 181 | gactagctgg | gaccgaccac | aggcatgcac | caccacgctc | agctMatttt | tgtattgttt |
| 241 | ggtagagata | agttctcgct | atgtcaccca | gcctggtctt | gaactcccgg | gctcaagcac |
| 301 | acctccatcc | ttggcctttc | aaaggtctgg | gattacaggc | atgagccact | gcatctgcca |
| 361 | cagtccccag | tctgaatgcc | tccctctggt | gggctggagc | tctgctccga | gatggcatcg |
| 421 | agtcatcctt | tctgcagagg | ttgacgacgg | ggcacccgcg | tggagcactg | tgggtcactg |
| 481 | tggcagaggc | caggcagggc | cagcRgggct | ctggcacttt | gcgcagccac | cgggaagtat |
| 541 | ctggcatcac | ccccactcac | attccacgag | gcatagcaag | cctagtagaa | taaacgtctc |
| 601 | cttgcaaaga | tgactttcat | ctcccgtttc | attccatttt | cctaacggag | agaaagtaga |
| 661 | gaaaggcaat | cccactgtgt | gtccaaagag | agccagacat | atttggtggc | cagtcctgaa |
| 721 | gactggcacg | ttggacagca | gctgtcctcg | agtgaggaat | gggacatgca | tctagtcaac |
| 781 | tacaccgcct | gtgtcctttc | cactacgccg | cagaaactgt | gcagccgcac | tgctgttttt |
| 841 | aattacaaag | tttaagtcgt | atgtatttta | acactctttc | aaaagttaaa | agactgaggc |
| 901 | ataaaacctc | agtatctctt | aatctatgcc | ttgttttaat | gaatgtctat | tgagtcctct |
| 961 | cagagagaag | ttgctggaga | atatacagta | gcaccccatt | atctgtggga | tacgttccaa |
| 1021 | gacccctagt | ggatgcctga | aaccatggat | agtcctgaac | cctatatata | aatatttgca |
| 1081 | catatgtcta | tatctacaca | catgcatata | catacatgta | tatacaccat | gttttttttt |
| 1141 | tttcagtctg | atcaccgaga | cagctactaa | gtgactaatg | gatgggttgg | atgagtggcg |
| 1201 | tctacagagt | gaatatgttg | gacaaaggga | tgattcgcac | ccggggtgag | atggagcaag |
| 1261 | atgcagcaag | atggcacaag | atttcatcat | gctactcaga | ctggcatgca | atgtaaacct |
| 1321 | tatgaactac | ttatttctga | aatgttttca | tttaatattt | tcagacctcg | gataaccaca |
| 1381 | ggtgactgaa | accacagaaa | gcaaagccat | aggcaagagg | gggctactgc | acggggcact |
| 1441 | gggtgacatc | tgaaggtcag | atcacacaca | gactttagtg | tgagtgtgtc | ccaaatggtg |
| 1501 | cagggagccg | acttatacga | aaaaaattac | tcattactta | tctgtcattc | aaatttaact |
| 1561 | agcatgctgg | ggggagggtg | tggtctgttg | gtttgttttt | gctaaatctg | gcaaccctac |
| 1621 | ctcaaagggg | gaggggctca | ttctaccaaa | caatgcatca | aagcatgggt | tttgtaaaat |
| 1681 | ttaaattata | ggaaaacgtt | taaggcaaaa | ggtgctctaa | tctctgtaag | ggaggcagag |
| 1741 | ctcattccct | aataacactg | catgcacact | cgaaggaaga | tgtagtgaga | taatttctgt |
| 1801 | gttcatccca | gctccttgcc | caacatgcac | ccccaaagaa | ctctggttgg | ttggatctac |
| 1861 | tgcacctgct | tctgaagaaa | tctccaattt | tggtggacac | cctccctcta | cattacccgc |
| 1921 | ctgacctttc | agaacccagc | gggccgggtc | tcagcacatt | acctgggata | aagaagacct |
| 1981 | tgatatgtgt | tcattaagca | aaactgaatt | ggaaggaaga | aaacagagag | ggagggaagg |
| 2041 | aaaaaaggaa | ggaagggagg | gagggaagga | aggggaaggg | agggagagag | agagagaggg |
| 2101 | gcatggagag | aaggaagaaa | agaaggaagt | aggaagggag | gaaagaaagg | gggaaagagg |
| 2161 | gcagaagaga | agaaaggaag | ggagggaggg | agaaaggaaa | gaaggaagga | aggaaagaaa |
| 2221 | gaaggaagaa | gagagggagg | gagggaggaa | aagagaggga | aggaggaaag | ggagggagag |
| 2281 | aggagaggag | ggagggagga | aaggaaggaa | ggaaagtgat | agtatgggat | cccattttga |
| 2341 | ctggacatct | ctgaaaatgc | ccctgtatgc | tcaccaaggc | cctcaagaag | gcactcaaca |
| 2401 | aatgctaatc | aatgaagcct | gttccctttc | tcagagccac | catcagcccc | tacagcacct |
| 2461 | gcatgggaat | caggacaggt | gtccccttca | ggtaagcaca | gctcccagat | gcagaggtca |
| 2521 | gtgagcggac | accacctgtg | gcttgtgcca | gttggaacac | ggcccccttt | cccctggaag |
| 2581 | aagcaccgcc | aggtcccaca | gcctggccag | cagagtagga | ggctgcgccc | cagcccttgc |
| 2641 | ctgcactctt | cacatccgct | ccctgctcct | gatggaaagg | ctaaagcatt | gggaagtgct |
| 2701 | ctcagagctg | gactttcacc | ccttgtagaa | aatgtcttct | gcccagatta | cccacaccca |
| 2761 | ccaaagagag | gcagaattga | aagaaagaga | ggaaatctcc | catcagcgcg | tgcaggcaca |
| 2821 | cccacgcaca | ccccagtgat | cgccaggtgt | gaactgtatg | taaggtaaac | aattccactg |
| 2881 | gagtggtgag | tgaatggagc | tcatccaatt | cgatattttc | tagatggagc | gaatggtgtc |
| 2941 | tacattctcc | tcacttgttt | ttactttttt | agccgtctac | ttggtgtttt | tggtgctgct |
| 3001 | taaaaatgat | ttaaagaaac | aaaaaaggca | ttagggggtt | gcacataatg | aaatgaggac |
| 3061 | gactgcaacc | aaggctgaca | cttattcttt | agttaattca | attgtgccta | attatcttgt |
| 3121 | tgctttgcaa | tccagcctct | cccccaacca | gcaagagcct | ccggaacatt | ccttataatt |
| 3181 | gcagagcagc | ccgagagctg | agatgagtaa | tcctcagcgt | tctcattctc | tgtcctgtcc |
| 3241 | ccgaatgcct | ctcaggatgt | ggaggagaaa | acttcggaat | ccagatcttt | ctctgagctt |
| 3301 | tgtgaggagt | ctctgcctgc | gtttccctca | ggcgtcatcg | tgaatggccg | gcagaccctg |
| 3361 | tgcacgtaga | atttcctgtc | tggctgtagg | ggaaaccact | ctgacagcca | ggcagagatg |
| 3421 | aaataaccca | actgaaaatt | aattaactcc | aaaacctccg | cagaaaataa | aacacaccaa |
| 3481 | gacatatatg | ggccgcgagc | aactttcagc | tttgggaagg | gatgggatgt | gattattcaa |
| 3541 | tttttctagt | ccttgactcc | aggttcttac | acattttctt | ctgtgcctat | gctgcgttct |
| 3601 | gtaattagaa | atttttccaa | cactctaaaa | cttcaaaatt | ataccctaaa | gtcaagtttt |
| 3661 | caacaaaagc | aggacttctt | tggcttacct | tcactgtaat | ttggtttggg | aaagtgtggt |
| 3721 | tttcagccat | agcaaagaaa | atggtcttca | gaactcgaac | tgtctttagt | gaaatgttat |
| 3781 | ttttcaccaa | atatgtgttc | ccacaaagtg | ttttctagca | gctgggagag | gtagccagct |
| 3841 | gagctctgtg | ttgaaacgca | tgccctgata | cccccccgtg | ccccatcctg | cagcgaattc |
| 3901 | ttgggaccca | tgcttcttag | gacctttggt | cctcaagcta | tttagagatc | catggaaact |
| 3961 | gcccaatgaa | caaggacagg | aaacagggaa | aggctgccgc | agcggattct | tcttcttctc |
| 4021 | cttccccttc | cccttctcct | tctctttcct | cttcctcttc | cctcctccct | cttccctctt |
| 4081 | ccctcttctt | cttcgtgaat | gagcgcactg | atgaatagca | gaggatgaga | accctgcagg |
| 4141 | ccaggcacag | gcagcatcaa | agaaacagag | ggtggagcac | aggtgcccag | cccaggagat |
| 4201 | ttaaaatcag | atcagggacg | ggcgcgatgg | ctcacgcctg | taatcccggc | actttgggag |
| 4261 | gctgaggtgg | gcggatcatg | aggtcaggag | atcgagacca | tcctggctaa | cacggtgaaa |
| 4321 | acccatctct | actaaaaata | caaaaaaaaa | aaaaaaaaat | cagccgggca | tggtggcggg |
| 4381 | cacctgtagt | cccagctact | tgggaggctg | aggcaggaga | atggcgtgaa | cccgagagac |
| 4441 | agagcttgca | gtgagccgag | attgtgccac | tgcactccag | cctgggcgac | agagcgagac |
| 4501 | tctgtcaaaa | aaataaaaaa | taaaaataaa | aataaaatca | tcagatcagg | cagaccaaaa |
| 4561 | ggccaagtca | ggatattttg | aagttgtacc | ccctcctcgg | acttcaccta | atgctcccaa |
| 4621 | tgtacacaga | atgttctgtc | cctggatgga | aggtgaccca | aaatagagaa | gaatcatgga |
| 4681 | aagacgaagg | cggcagcctt | tttgccgccc | cacaacacct | gacacccgag | tgatgggtgt |
| 4741 | ggccctcaag | ccaggaggcc | tgcgtttggg | tcctggctct | gccgcttaat | ggctgtgtga |
| 4801 | tgctgagcaa | ttacttagcc | tctccatgcc | tcagtttcct | cccttgtaaa | tggatctaat |
| 4861 | gaagacacct | acttccctta | ctcttcgtcg | tgggaaccaa | gtgaactaat | gcatgcagca |
| 4921 | tgctgaaccc | tgcagccgct | gtggcgaaaa | cactcattga | gatgcaagtc | tccacgcaac |
| 4981 | agcaggtaaa | gccccattgg | aagtcatcgt | ttataatctc | aattatttcc | ttgacctaga |
| 5041 | attgttcaat | attaacagaa | atgagatcag | aattctttca | gccaggcatg | gtgccccaag |
| 5101 | agtgacagtc | ctgaagccac | tgctatttat | ggagcccttt | ccacagaaca | cttccatgaa |
| 5161 | gcacggttaY | cattcccatt | caYggaagag | gaaactgagg | cacaatgctg | tcacgtaatt |
| 5221 | tgcctacaca | gccagagagc | aactgagcca | agattcaagc | cctccgtctg | tccacggcct |
| 5281 | gccctctcag | ccactgtgca | atgctgactg | cagaccagcc | acaactgttc | tgccagggct |
| 5341 | ctgagtaacc | ggaacatggt | gatttaatca | ggaggagata | tttgcagaga | tgttgaaatg |
| 5401 | ggggacatcc | ataagtgaaa | gcagtgattt | gcaaaaataa | tctggctgct | gctttcccaa |
| 5461 | gcttcctcct | atggaagcct | cccctgtaac | accgagtggc | acaccttctc | tgccctggcc |
| 5521 | ggagccgagg | gcacagtccc | tgacagagct | cagcacccac | ctccaagaca | cacagggaga |
| 5581 | cagtcttggg | gtcagcgaat | ctgcacattc | cgccggcact | cgcagggcca | gacaagctgc |
| 5641 | tctggcccaa | tcttctcatt | ctgtggtcga | cacactgcgg | cccggaggga | gcagagggtg |
| 5701 | gaatttccca | gggtcaccct | ttggaaggat | gccggagcca | gaccctggcc | tccccgaagg |
| 5761 | aaaataaagc | agtggccctg | agccggggcc | acagagctcc | atgtggccgg | agcagggctg |
| 5821 | cggtgggaag | gggaaggatg | gagactgggg | caccctcatc | accggttaag | gggctctcct |
| 5881 | gccaggcgca | cgagacagaa | cattcatgat | gctctgagac | agaggaaaga | aggtacggac |
| 5941 | agcagggaag | actctctgct | cagccatctt | tccaacatat | tgtatttaaa | ctatcaaatg |
| 6001 | ctttagccaa | tctgcaaaaa | ataaattctt | tgcacagggg | ggtgaaatct | ggctctctcc |
| 6061 | tcagcagaag | gcccttctcc | acggctcccc | ttggctccca | cagaaaacac | agggcagctt |
| 6121 | ctgcagcttc | tccacaccat | atatctagaa | tttacataat | cacaggcaaa | taaaacgata |
| 6181 | aaagcacact | ctttcataac | aggcacattg | ttactattat | tattcttaag | gcaaattagc |
| 6241 | ttctgattat | agagattagt | caaaaccatg | attctgttga | ttgtgaggta | gaactgattt |
| 6301 | tcttttcttt | cttttttttt | ttttttcaac | aaggagaaga | gctgttgttt | cgatgtcaga |
| 6361 | aaattacata | aaatggtact | cagagagaaa | taaagtttct | gaaagtcatt | taattatcag |
| 6421 | ttctcttgga | agcgtttagg | cattccagcc | tttcggttgt | tgtctgtcta | gccaaacatt |
| 6481 | ttaccctcaa | gtttattaac | tgtttgattt | tattttattt | aacctctttc | ttttaaaagt |
| 6541 | ttctccaatt | taaaatacca | atattttaga | tatttgtatg | tgtttattgg | gctttcttca |
| 6601 | tcactgaaat | aattcatacc | tcttttgaac | caaagagatg | cttgttcttt | caccagcatt |
| 6661 | tttgatcaaa | gacaaccagg | aaggaagcat | ctcctccctg | ggcaaaatgg | aggatccaaa |
| 6721 | accattaaga | gtctgctgca | agatgtcacc | actcagactc | agagagcttc | tggctcctca |
| 6781 | gggcagcgcc | aggcaccaga | ggctccgtga | aagcccttgg | caggagagca | gcactcacRt |
| 6841 | tgctcctccc | tgccccctac | ctgttttaat | cattagtcct | cagttaggtc | cagtgtctga |
| 6901 | gccctgcctc | cagagttgag | tcccgcctcc | tacctcacct | gaactaactc | tgaggttcca |
| 6961 | acctgggggt | gattttgccc | tctaggggac | atctcacaat | gtgtggagat | ggtggRggtt |
| 7021 | atcagaatag | tggggaggtg | gtgggaagag | gcagcgtttg | agccacaggg | cagtcccacc |
| 7081 | acaaagaatg | atctggcccc | caatgtcagt | agggtccctg | ttgagaaacc | ctggtctaat |
| 7141 | tgatcagaaa | tggtgggtga | actttgaaca | gataacacca | gggagtcgtg | cagctctagg |
| 7201 | ggaatcctct | cggaccctgg | agtgcccgat | agaagcRgcg | tgcacatggg | gactctgccc |
| 7261 | agatccgagt | ccttttgtcc | atcatgatgt | cccagattcc | tgctgtcatt | ttgcatagaa |
| 7321 | ttagactgga | acatgcaaaa | atatatacaa | ttgttgatac | caagatgtct | gaatttagga |
| 7381 | agaattccca | aacagaaaga | tccctccccc | aaaatgtatg | catataaact | tttaaggatg |
| 7441 | cagataaaat | tgccagatgt | ctttcaatct | gattacctca | catgctggcc | tgtatcccag |
| 7501 | atgtgagatc | cagagaaacg | tgatggaatg | tgtcactgtc | ttcttttcac | atcctctccc |
| 7561 | agatttcatt | aatctgctga | taggtactca | ttaaaatact | agtattcgcc | ctgggacaca |
| 7621 | gtttcatgag | attacttcac | gaccgttaca | ggacatatta | cagtaaatga | attttccttc |
| 7681 | ttttagcatg | gtggattaaa | aaaatacata | attttgtgcc | ccagtcctca | aagaattaaa |
| 7741 | catttcagca | tatcttacga | caggatattg | gcaacgtttt | ctgtaatggg | tcagatagta |
| 7801 | aatattttgg | gctttgcagg | tcacgtggtc | tctgtcgcaa | ctactcaaca | gtgctatggc |
| 7861 | aggacagaag | cagccataga | tgatgtgtaa | atgaacaagc | ttggctgcat | tccaataaaa |
| 7921 | ctttatttac | aaaaacaggc | tgtgggaagg | acttggcccg | caaccctggt | ttgcctacct |
| 7981 | ctgtcttaca | acatagattt | cctgaaaata | atgcatctag | gcagaaagaa | taggggaaag |
| 8041 | ttcagagtaa | gacgttgtaa | aatatcggca | agagttctca | tcgtcttaca | agaagtagcc |
| 8101 | tgtgtacaac | ttaatatcaa | tccaaggagg | accaagaggc | atgccgaaat | gagatttaaa |
| 8161 | ggttaaacag | aaatctggag | ggaaaggaaR | aattgcaacc | acactggcca | atgatctagt |
| 8221 | gttgttactc | tcatttattt | gctaagtttc | cctttcagtt | taaagcacgg | catttaattc |
| 8281 | agacattgtc | cttcactccc | catgagccaa | tgaaagagga | gatgcgtggg | ctgtggaggg |
| 8341 | gctgagatgc | ttgtggRcac | ctggggcagc | ggctgtgggc | tgtggtctcc | cgggctgtgc |
| 8401 | aggtcaggag | gtcaggaggt | ctctggagag | aggcatcatc | atggagctgg | gcctgctgga |
| 8461 | gaaaggagtt | ggccacggac | accccaaaca | ccccgatttg | atcatgacac | tttctgtgca |
| 8521 | tggaacccca | catgtacccc | ttaaaatttt | accctgtaaa | atattatgta | tcaataSaag |
| 8581 | agagcaccaa | agcaatcatc | ctactagcca | ccatatgcca | tcctagcttc | tccacagtaa |
| 8641 | cacgtcattt | actcctcaga | gcggctcagc | gaggtagggc | ctgctgatgg | tccctttcac |
| 8701 | aggtgagaac | acagaggccc | tgggaagctg | aggggtttgc | tagagatcag | gaagccagga |
| 8761 | ctcgggcttg | ggtgctgggc | tctgggcctg | tgtgtctgac | ttctccgagg | gggtgctgcc |
| 8821 | ttctcctttc | ctctctttct | ccctaacccc | cccacactca | gccactaagt | atttttagaa |
| 8881 | ttattactat | ttaggtatca | tctataaaac | atgacattta | ccattttaac | catgttttca |
| 8941 | tgtatactcc | agtggcatca | agtacattca | caccattgtg | caaccatccc | caccacccat |
| 9001 | ctccagagcc | cccattcaat | agaaaccccc | ccttctcccc | tcccccagct | cctggccacc |
| 9061 | accatcctgc | tttctgtcta | tgaatttgac | tgctcagggt | gtctagagtg | gagtcctgca |
| 9121 | gaatgagccc | ttttgggtag | aggtgatttc | attcagcaca | atggcctcaa | ggttcactgg |
| 9181 | tactgtagcg | cgtgtcaggg | tttccttcca | gtttaaagta | gaatcctctg | gttgtttgtc |
| 9241 | cattactcca | tggacacctg | ggtggctgcc | acctgtgccc | tggtctctaa | gagctgctgg |
| 9301 | cactctcgct | cctccctggt | ccctttcctt | gctcacctgc | cctcccctgg | ctcggctcct |
| 9361 | cctcccaggc | ctccagcctg | ccttcccggc | accccacgcc | tgctgcctcg | ggaatcttgc |
| 9421 | ccaaactcca | atctgcttgg | gcctctctta | ctggtaaacc | cacaaggatc | cccaccttca |
| 9481 | gcaaaaaaga | gttccaaagg | ctccatgtag | gagcccaggc | ccctcactga | ctgccctggc |
| 9541 | cagcctctcc | agtgttgccc | caacggagcc | ctgccctatg | tacctaccct | tgttttcctg |
| 9601 | aaaaccacac | tctttcctgc | ctggaggaca | cccttctcac | cctggagaga | ttacccttct |
| 9661 | agaaacaaac | caaacacacc | ctctgcagag | gctctgccag | ccgccttctc | caggcaaggc |
| 9721 | aggctgcctg | cccccacgct | cacggcagct | ctcctggcata | cttgctgcct | cggtttgtgc |
| 9781 | aaaagcaaac | ctgcaagtcg | catacttagg | ggatggcccg | ggaagcccat | aaggatgtgg |
| 9841 | gagaacaaga | cagggagggc | aagaaggaca | atcacagact | catcctggag | cacattcaac |
| 9901 | tgtgggacac | aggaactcat | ccctgagact | gcctggaatg | tagctcggaa | ctgtcccaac |
| 9961 | agctcctaac | cttccgaggt | tgatggtccc | tcctggttaa | ctccgtggcc | agcaagaggt |
| 10021 | cccaggaggc | catcactgca | cacagcaacc | atccaccatg | cctgcatgca | ggtggcctct |
| 10081 | gggtggaaca | gagggatgtg | ggcaaaaatc | tgggatgacc | gcaagggcgc | caggcacaca |
| 10141 | gtgggtttgc | gactgtggta | tctgcctctc | ccacgggagg | cagaccccat | caccaatttc |
| 10201 | tctctgtacc | cccagcccat | ggcaggttgg | agacatctga | aaaaggtagc | aaatgagtcc |
| 10261 | atgagtggct | gtgtgggaat | gagatggact | gggtcttggg | agagaggagg | caggagtgga |
| 10321 | tgttggaaag | acaggctgct | gagaggagaa | cacagtggca | gggcaggtga | gcagcggcca |
| 10381 | ggggctccct | cacacacttc | accccagccc | ctgcgccagc | ctcatctgcc | tgtctcccac |
| 10441 | ctgacccttt | tgccgttcac | ctccgtcctc | tctctgctgg | gttctcaagg | caatcgcacc |
| 10501 | ttgcctagca | actgttgcta | ccgaaagcca | acgtccctgg | tattccaaca | ataaagcaca |
| 10561 | gcgctccgac | tacaactccc | agatattatt | gaaaagaaag | gcaggtttat | ttcaaggcca |
| 10621 | ggaggggaga | ggatctgcgt | gttggaggct | ggagcagcag | cgcattcgat | ggccggcctg |
| 10681 | acagcatggc | gagcagcttg | tgctggtgcg | tcctccagaa | aaagaatgcg | cgctctccag |
| 10741 | gaggtgatgg | tccctgttca | taaactccct | gttgctccct | gttcccattc | agctgggtca |
| 10801 | acatgtgcct | gtaaattcct | cccgaaaggg | aaatcataac | agcatcagca | gccccagaaa |
| 10861 | tgacaaacaa | ctcaagtatg | gaaagccagc | tgccaagtat | tcaacagtac | tcatgttgca |
| 10921 | ccagaaacaa | aaaaaatcag | ataagaaaaa | taaacccagt | tgtgtgcata | gttccttaaa |
| 10981 | tatgtatccc | attttgtggt | tccttccagt | cttcggtgta | atgaatatat | ccattggtta |
| 11041 | ggggtcacgg | aatggcaggt | cctaccaggc | tgccttggat | tggcgaactg | tgatgttctg |
| 11101 | ctttctccct | tctctgaagc | atggagcggt | gcgagacgtt | cagaacagac | agccactgac |
| 11161 | attaattttc | ctgctggcct | ccttgctaaa | ttgttttatg | acttgtttgc | tgtgtcttgg |
| 11221 | ttgccctatt | gtgttgagtt | gatttggcag | tggttattta | aaacatgctt | tgtcatcctc |
| 11281 | aggatgagtg | gaggatcccg | ggggtcactt | ttgcacaaca | aatggtcatt | gagctgaaga |
| 11341 | actgtcagag | tcaccacctc | cacagtcaag | tggcaatgga | atccgaagac | agggtcagct |
| 11401 | cggtacacca | cgagccgaga | tccacgggac | ggacggtgtg | caggcaccaa | agcgtggaca |
| 11461 | ggccatgctt | tgcttaacag | catggggctg | gccacggcac | cagggcctct | gccagcctca |
| 11521 | cgaggcccct | cctggcgtgg | ccataaaagc | cacagctgca | aacgctgaca | cggcaagaaa |
| 11581 | agaatatggt | gagaaaccag | cttttgcctt | tgcttctcag | actcctcgga | agatccgaag |
| 11641 | ggcactttcc | catccccagg | aatgagaggc | cagattcctc | catggtccag | tcaggaaatg |
| 11701 | taatcaagca | tcaacgcgga | gccaggatct | gtgcctcaaa | cttgaaacgt | ggccctatct |
| 11761 | tcaagggtgc | tcacactcag | atgacttaaa | ccaaaaatga | cacggtgtgg | cctgcacttg |
| 11821 | cccatgccat | agtcaggaaa | gcctagtcaa | ggacaacgca | agcccagagg | aagagggtct |
| 11881 | aaacccagcc | gagaacagcc | acccagagca | gaggccctcc | cctgagagaa | agccacctgc |
| 11941 | tctcagccat | ccctcttctt | tccctacgag | ctccaggaga | cagaaaccat | gatgcttagg |
| 12001 | tagacatcaa | tctgttatgg | caggcaccag | aatgtttctt | ctcctgtgtc | ccatcaggag |
| 12061 | tcaaaactga | tctcagcctg | ggcaatgtag | caagacctca | tctctacaaa | agataaaaag |
| 12121 | gttagccggg | tgtggtgggg | tgcgcctgta | gtcccagcta | ctctgggggc | tggggtggaa |
| 12181 | ggatcgcttg | agcctgggag | gttgagactg | cagtgagccg | aaatcatacc | actgcactcc |
| 12241 | agcctgagtg | acagagcaag | cccctgtctc | aaaaaaaaga | agaagaaaag | tgatatctct |
| 12301 | gctactgagg | acaaacatca | tgcacccttt | cttcttaaag | aggagcaaat | ttcccacttc |
| 12361 | caagtcctgt | tagtgaaagt | cccggaggag | ccccagcctg | agccatagca | ggagagtcgc |
| 12421 | agagagatga | aagggtctgt | ccccagccca | ctgtggcctc | cagaggtagc | atcttctgct |
| 12481 | cagcagcaga | acaaacattt | ccatggagca | gctaagttga | aaagccccca | ggaggcaagg |
| 12541 | gtaggagtta | caagaaacca | gaaagtctac | ggcaaggtca | gggtgactcg | ggtggggttt |
| 12601 | ctcttgcttc | ccctttcaat | agcattcatg | aagtggctga | aagtcttcat | cttgttatta |
| 12661 | gctttgcttt | ctggcctcgt | ttatctctaa | ttgttttcct | aagccttgaa | gaggaaattc |
| 12721 | tgttttcttt | ctggtcctgc | ttacatttaa | atccacttaa | gtttctgtct | gtggctttct |
| 12781 | tctcaaaagg | gccaccggct | ccctggggga | caagcatcct | ccttataaag | ttgaagggaa |
| 12841 | ctgggaagat | cttgaaagac | ttctctattg | ttcatgcaga | caagttgtgg | gaatttattt |
| 12901 | ctgtgggtct | gtttcctctt | tgttcagggg | gccccattct | tctccaatta | tctgcctata |
| 12961 | ccagagagta | ttttcagaat | ctgtgcagga | tgttttagac | tgaataagga | caagcattga |
| 13021 | gggaggttga | tattttgcta | ataataacag | tggaaaaagg | taccatttct | gaagcaccta |
| 13081 | ctgtgtgctg | gaaccttctg | tgtgcatcac | attttaaccc | tctcaactct | ccaggaatgt |
| 13141 | attatgacac | ctactctata | gattcaaaaa | ctgaagggca | gagatgtaaa | gaacttgcca |
| 13201 | gagttaccag | cagtgagaga | accaggggtc | aaacccaaga | ttgacccaag | ctcctgctga |
| 13261 | ccccacgatt | tcacgtggcg | cccagtgaaa | ctgtaagcaa | agcaccactc | cacaaatgcc |
| 13321 | tcactcatct | ccacacccac | ctgacacagt | cattggattt | taggacacgc | atccttcttt |
| 13381 | caaagttcag | gaatgttcac | aagcaagtca | aaattcattt | tgaaagctcc | tttgacttga |
| 13441 | ccgaagacgc | cccaagatgt | caccaaaagc | caaggatggg | aagccctgtt | ctatcaaggt |
| 13501 | gctgaaaccc | agtcctgggg | agtgtttgac | ttgggaagta | ggctgccctc | cttctgctca |
| 13561 | ccgtgggcag | ggaccagaga | gagggtctgg | gattcaatac | gagcctgatg | ggggttctgc |
| 13621 | catggggtgt | tggacggggg | cgttcgacaa | accagtgcag | gctcaaaccc | tgctcctctt |
| 13681 | gcccccagcc | ccaagagtca | ccgagaaaac | aaacacagta | agtctttctt | aaacctccca |
| 13741 | ccaagcaagg | gtgcaaagga | agaccatggg | cctcagcgtg | aatgcccacg | caccacagct |
| 13801 | cttggcatgg | gtccccctgc | ctgccacatg | ttaccaccac | tcgctttgaa | gaacagcgtg |
| 13861 | ttcatcagca | ctcacgaggc | ttaacagcca | cagtttaacc | tagtaatgcc | cagcccccac |
| 13921 | agcaggctag | tcatcatggt | cagtgagaaa | cagccagact | tttcacgcag | atgggcattt |
| 13981 | tcggggccag | tctctgcact | ctccaagcag | gagctggttg | gagtctctgc | aggctcaggc |
| 14041 | ccaagacggg | tggccttccc | agcagcttcg | ccatatcagc | tgccacgtgc | tataccgatg |
| 14101 | tccttcgagg | ctcatcctag | gacttcatca | aaaccgtttt | tgcagatgcc | aggactgtaa |
| 14161 | tattcaccac | ttcccccaac | cagcacatga | ccttgatgga | gctggaatca | gccagatcca |
| 14221 | aacaaactgg | gcgcaacgtc | tgctctccag | ctgcactgtg | cttggggtgc | actcaggggt |
| 14281 | ttgttcagct | cccccgccaa | agaattggag | aagtcgtatt | tcacatataa | atatatttta |
| 14341 | cttctcagtt | cactaacatc | agcctctcat | aaactcacta | aatgaaaagc | tgcaagaatc |
| 14401 | actttgttat | ggatatgtaa | aatgacatat | tgcattggct | aattatttct | ctatggaatg |
| 14461 | aacagcccca | tgactttcag | gggccccaaa | agagaacgct | ctacaacaga | agcacaaggt |
| 14521 | cattctttag | tgggcaggta | attgggaact | ccatgctagg | ctgtggctta | ttagggattt |
| 14581 | gcggttcccc | tcaatgcaca | ttaactgaaa | agctggacag | tatctagagc | aggcgtgcct |
| 14641 | tccatggcaa | cagcatctcc | gtcttcccag | tgcatatggc | tgtcaaagtc | cttgtcaggt |
| 14701 | accagttcag | aaacacataa | cccatcctgg | tatttttgta | gtttcacaca | tctagtggac |
| 14761 | tacttgtttg | caataacatc | atctggtgag | cttttgagga | tttgattctg | tggcacttct |
| 14821 | tgaggaatac | attttttaat | atcctttaat | ttttgcctaa | ggacttggct | gaatccaagt |
| 14881 | tagatccaca | tgtaaccttt | ttaaggaagg | ctaaattgag | acagaaaggc | caagattttt |
| 14941 | ctccgagtag | aaatggatat | ttattactta | agaaattgcc | taaatgttgc | tatcgaggct |
| 15001 | ttataaagac | tcacttggtg | tactggggaa | aaaacacaca | aagcaaaact | agtccactga |
| 15061 | ttctgtacca | attacaatgt | ttgccttagg | tgaattgcca | atctatgagt | catatttgtc |
| 15121 | tatatcactc | tgcccagggt | caagagaagt | gtctcaaata | agcaggatgt | ggaaaagcgt |
| 15181 | ttgatcacgg | tggcgatgcc | gaggtgggga | aaattccagt | gataacctct | gaggaaaata |
| 15241 | agccatttct | tacaactaaa | tcctttctgt | catttctaaa | atgaaaatta | ggagcttatc |
| 15301 | aaaatgtaac | atagcttaac | tatcaagatc | aattagagat | ggaaataatt | gggtagctag |
| 15361 | tgttctctac | agaaagccag | tgtgtaagga | aacagtagtg | ttatttgtag | gaggcattta |
| 15421 | attatttcca | agttgtggga | caagtaataa | acaagggtac | atttctggct | gtagaatttt |
| 15481 | gatctataaa | tgtcctttga | ggaatcagct | tgttaggtgt | attagtctgt | tctcacactg |
| 15541 | ctgataaaga | catacccgag | attgagtaac | ttataaagga | aagacattaa | atggactcac |
| 15601 | acttccacgt | ggctggggag | gcctcataat | catggcagaa | tgtgaatgag | aagcaaagtc |
| 15661 | aggtgtcaca | tggcggcagg | caagagagtt | tgtgcagggg | aactcccctt | tgcaaaaccg |
| 15721 | tcagaccttg | tgagacttat | tcactatcac | gagaacagca | caggaaagac | ccgctcctca |
| 15781 | tgatttaatt | acctcccacg | tggtccctgc | caccacatat | gggaattatg | ggagctacaa |
| 15841 | ttcaagatga | gatttaggtg | gggacacagc | caaaccatat | cattagcttt | tcaaagattg |
| 15901 | tactttcaat | tatgatcaag | gttccatctt | agaaaaagaa | agcaaatgaa | taaaataatg |
| 15961 | gtcttaaaac | caaattccaa | attttggttg | cttcaaggYg | taaggtctta | caaaccatgt |
| 16021 | ttggaacgat | ggtggatagt | tctttgatga | ctgacaaaga | gttataaatt | tcttctgtca |
| 16081 | ccttacagta | gaaggagaat | cagaactgat | ttttttttcc | ttcaaaaatt | ccccgctggg |
| 16141 | gacaatgacc | tcttccacag | ctttagtgtg | cacactcatg | tacaatttga | acaagcaagc |
| 16201 | catgccttct | accccccagt | ggcatccctg | cattcctcaa | cacaccaaag | ggatctggag |
| 16261 | acaacaaagg | ggtcagcaga | tacaggtctt | tctataactt | agtgatacgt | gtaccaagat |
| 16321 | agctgttttt | tcaggggagg | aggaggatat | ttaagatatt | ttaaacatct | ttttaaaaaa |
| 16381 | ttggatggta | ccaaaagata | gagaattgta | tcttccctat | ccctagagac | tcatgccttc |
| 16441 | ttccagaatg | tcatgttacc | tgattttctg | tttgcaccgg | gttgaatagt | aaccccaaaa |
| 16501 | ttcatgtcta | tctggaatct | cagaatgtga | ctttctctgg | caatagggtc | tttgcagatg |
| 16561 | caattagttc | agatgaggtt | atagtgggtt | aggtcagacc | ccaaatccaa | tgactggagt |
| 16621 | ccccataagt | agaagagata | gacacaggga | gacagaggca | cagagggaag | aaggtggcgt |
| 16681 | gttagtggag | ccaaagacca | gagctgtgaa | gctgaggagc | actgaggctt | gctggcaatg |
| 16741 | ccggaaactg | ggtcgaggcg | tcctcaggga | gcacagccct | gctgatgcct | tgacttcaga |
| 16801 | cttctggtct | ccagaactgt | gacaatatcc | atttctgtcg | tgttcagctc | ccagtttgtg |
| 16861 | gtcatctgtc | acggcagccc | tcggaaccta | atccgctgct | gaaaacatgc | cccttactga |
| 16921 | tgtgctgaac | cctattccca | tatttggaca | aagaaatgga | atcatgtggc | atgaccaaaa |
| 16981 | ccatctgcat | ctttagcagg | ggcggcatcc | taggctgcat | gttaggatct | cctggggttt |
| 17041 | ttttaatttt | aaatcccact | gcccaagctg | caccccaacc | caattaaatc | agaaactctg |
| 17101 | gaggtagact | cagacctggg | tatttttaac | cctccctggg | tcattccagt | gtgcagccaa |
| 17161 | gaccgtgaga | accactgatc | tctaggatgc | agcagcgtgg | ttttctcaca | aaaccactgg |
| 17221 | cttcagagtt | agtcaagttt | tgggttaatt | tcttgttttg | ctacctccta | gctgtgtcct |
| 17281 | tgggcaagtc | atttaatgta | tctgatattt | actttctccc | atctgcaatg | agattgtgag |
| 17341 | gatccgtctt | tttaagcatg | taaaatatct | gaaaatgcct | ggctcaaagt | agacagcaaa |
| 17401 | taaatgtcat | tttcttttca | ttctcccgac | acatagaggg | acaatttcaa | aggacatgta |
| 17461 | agaatccagg | ctgtagagtg | aggctgtgag | aatcaaatcc | tgactccacc | acctactagc |
| 17521 | tgtaaaacca | tgggaacttc | tcagtgccca | gtttcctcac | ctataaaatg | gggcctcaga |
| 17581 | gagccattat | gaggtttaca | tgggataata | aggtaatttg | acccaggtaa | agcacttaga |
| 17641 | atagtacctg | gctcattgaa | gcattcatta | aatgttagct | catattgtag | atttacatta |
| 17701 | tagacattat | ctgacaacac | tYtgcacagc | ccgccccccc | ttggaaatgt | gaacttcatg |
| 17761 | tggtacattt | tagcattgct | tctcttcgcc | gtccagagca | acatgatata | cacaaaagag |
| 17821 | tcagtagaca | gcagtccgga | gacttgagct | ctgagctccg | ctgagatgcc | actaagcttc |
| 17881 | aggatggaag | acaacacttt | tctctatgcc | tcattccagg | actcaaatta | taaaagaaag |
| 17941 | ggtttactaa | gctgatccct | atggttcctt | ctagcatata | aaagttatga | tcatctgaat |
| 18001 | attataaagc | aatagatgaa | gtttgggctg | tgtttagtaa | acaatctcta | tgtttttatg |
| 18061 | gttaggattt | tattctgagg | ctagaattca | cacaaaaacg | tccagtatcg | acagagaagg |
| 18121 | aatccaatcc | atttcattgg | aacaaagaac | agccttagag | atttttcaag | aagtttcagg |
| 18181 | ccgagtcacc | cagtctccca | gtctaccgta | taactgctgg | ttgaagctgg | agagaagaca |
| 18241 | ttagtggctc | atgcacaaac | tttaaagctt | aatttatgtg | agaacataaa | ttgatacaac |
| 18301 | ctcactacta | tgagattaaa | taatatgtat | caatagtcta | aacaatacac | agtaattatg |
| 18361 | tttctaggaa | tctctcctga | ggaaatacaa | ttaaagtggg | aaattagata | atagggatta |
| 18421 | gtagtctaca | atagtctaaa | ctatacaaag | taattacatt | tctaagactc | ctgaggaaac |
| 18481 | acaattaaag | tatccttttt | tcatgctttt | gggaccagca | attggagaat | ctgcccagct |
| 18541 | caNtgaaaag | ccagttaaat | agggaaatct | taaacaatgg | tgcaaatata | ccataaatac |
| 18601 | gttgttataa | gttacaatat | aaaaatatga | attttctcac | cagtcttgca | ataaaggacc |
| 18661 | aaggctcttc | tctgagtatc | actcatgttc | tgattggaat | tatgtgccct | ctttcttgca |
| 18721 | caaaacacgc | ctatataatt | catgctctta | attttgagtt | ttggtttctt | taaagtggaa |
| 18781 | cacaaactta | aatatttgga | ggacaatgtg | acagtagaca | ctttctccat | tttaccattt |
| 18841 | tattttctca | aattgttcag | tttcctggct | cataatctag | ttttatagca | actgtattat |
| 18901 | tacttcactt | tattgcatct | ccccaaagca | ttctacttag | tttttatagt | ttatatggaa |
| 18961 | gcaaccaccc | tctttctttt | ctcactcata | tttcacaggt | tagtattcca | accaatgaca |
| 19021 | tcacaacaac | tgtcataaac | aggtttgaga | acaaacacgg | taattaactc | ttggtaagcc |
| 19081 | catattccaa | atagtgggag | aaggaagact | gaggcttccc | gatgcaagcg | gcatatttac |
| 19141 | cgaaggcata | gaagacgtca | gcgaatccag | caaaacaatg | cagggaaaca | gtgattatga |
| 19201 | gggttccttc | tgtagtcaaa | tatgtcatca | aaggtttatg | tttaaagatg | tttgaacatc |
| 19261 | tggaatagta | actgatgctg | gcagaaatat | agaaactata | taagtttaca | atgagaaaat |
| 19321 | agctaagtaa | cataaaacat | atgatgaaat | ggtatgtaga | catcaaaaac | tgcattttaa |
| 19381 | aaactatttt | atgatataga | agatgcccat | attatgatct | aatgtataat | tcaataaaga |
| 19441 | tttaccaagc | aatagaaaat | tttgtaaatt | ctgaaaaaaa | agtctatttt | ctatctttct |
| 19501 | tataaaaacc | aaagtgggcc | aggacttgga | aaacgggact | gatgtcatgt | tgaactcctc |
| 19561 | gcttcctttg | accttgatct | atttggagtt | taggcattgt | ttttaagaag | aaaacatgcc |
| 19621 | gcgcaggttc | tctaataata | aaatgcacat | aacctcaaga | aaaggtgggg | tcatttttct |
| 19681 | tcttatatgg | ccaagtaagc | ttctcctaga | ccttcctgca | gataaccact | atcaactttg |
| 19741 | gataaaaata | taaaataagg | cttctgttca | ctagactgtg | agtaaaaagc | aggaagactc |
| 19801 | tagcagcaag | ctagaggaaa | aaaaatgcca | agaggtgaaa | ttcccatttt | tatagctttt |
| 19861 | agcctgaggg | catgtcaaag | ttgtcaccat | gtaagtgagt | gaatctctaa | aagaaaacgt |
| 19921 | tttgtttttc | tgggctgaag | acaacagagt | tcagaacaac | tagggtcact | ggaggatgag |
| 19981 | ggagtaattc | tggaaaagag | acaagcacag | aagaagcacc | ccaaattttc | taagtgaaat |
| 20041 | ctgaacctta | tatgtgagag | gtggattcaa | agcagctaaa | ctaagtgtaa | aaaactgaac |
| 20101 | taaaattcaa | actgctccag | gggaaagagt | tttcagtttg | agtccaatca | aattaattat |
| 20161 | ctgccctttg | aaaaaatcag | tgttcttccg | agaaatataa | cagaatccag | atggcattca |
| 20221 | caatgtccag | gatacgatcc | aaaattacac | aacagaggag | agacaagaaa | atgacctatc |
| 20281 | cacaagggaa | aaataataga | tgaagaccaa | ttctaaaatg | acccaaatgt | aaaaattatt |
| 20341 | aaacgagaat | ttaaaagtaa | ggacagaagt | gaaaatatgt | tctccatgcc | tgtaaagatg |
| 20401 | gaaagcatca | tcagataaat | agaaattata | aaaaggaatc | aaatgaaaat | tctagagcat |
| 20461 | caaaatacat | gtatgatatt | ataatgttag | acacatgtcc | ttgtacattt | gtccaaatcc |
| 20521 | atataatgta | caacactgag | aatgaacctt | actgtaaact | atggacttag | gtgatagtga |
| 20581 | tgtatcaatg | taggtttatc | aattgtaatt | aaagtaccac | tgtggtggga | gatgttgata |
| 20641 | acagtggaag | gtatacatgg | gggtggaggg | tgggcaggga | gtatatggaa | aatctctcta |
| 20701 | ttttgctctg | aacgtaaaac | tactctaaaa | agataagtat | tttcttaaaa | tgcaacttaa |
| 20761 | aaaattcttc | atatggaccc | aatagcagaa | tggatatgat | aaaagagtct | gtgaacttga |
| 20821 | atataggcca | agagaactta | ctcaatctga | aaaatgtaaa | gaaaaaagat | tggaaaaaat |
| 20881 | taacagagcc | tcacaaaccc | ctgtgacaat | accaacaatc | tactatcagt | gtaaatggta |
| 20941 | gaatggaggg | aaaagtgaga | ataggaaaag | agggaaacat | tttgaaaaaa | taaggaccaa |
| 21001 | aaagtttccc | aaatttaatg | aaagacataa | atttacagat | aagaaagtca | gaaagcctcg |
| 21061 | agcagaaaac | tacagagaaa | accacaccca | atcacccata | gtcaaacagt | tccaaagcaa |
| 21121 | agagaaagag | aaaatcttga | aagcaactgg | agaaaaacaa | aacataatgg | acagaagaac |
| 21181 | accacatcaa | atgacccagt | ttatcattac | agaaggccag | aatatactag | aacaatatat |
| 21241 | ttaaagttct | aaatgaaaaa | ctttaaaaac | ctattaaccc | agaatctgat | accaaatgaa |
| 21301 | catatccttc | aaggattaag | acaaaataaa | aacaagttca | tataagagat | agctgacaaa |
| 21361 | tcactgacag | cagatctcta | caggaagttc | tttattctga | agggaaatca | tatcacatgg |
| 21421 | aaattcagat | cttctgcaga | aaaggcaatc | tactggaaat | ggtgaatata | taaaatacct |
| 21481 | gggaagtata | gaaaactttt | cttcttgatt | tgtttaaaaa | tatgcacaac | tggccaggct |
| 21541 | tggtggctca | cgcctgtaat | cccagcactt | tgggaggcca | aggtaggcag | atcacttgag |
| 21601 | ctcaggagtt | tgagaccagc | ctgggtaaca | tggtgaaaMc | tcgtctctac | aaaaaataca |
| 21661 | aaaatttgct | gggcatggtg | gcacaaacct | gtagtcccag | ttactcggga | ggctgaggca |
| 21721 | ggaggatcgc | ttgagcccag | gaggcagagg | ttgcagtgag | ccaaaatcac | accactgcac |
| 21781 | tccagcctgg | gtgacagagt | cagaccctgt | ctcaaaaata | aaataaaata | aaataatata |
| 21841 | tatataaaat | taaataaaat | aaaacaaaat | tttatattat | ataaataata | taaaattata |
| 21901 | ttttatatta | tataaataat | ataaaattat | attttatatt | atataaataa | tataaaatta |
| 21961 | tattttatat | tatataaata | atataaaatt | atattttata | ttatataaat | aatataaaat |
| 22021 | tatattttat | attatataaa | taatataaaa | ttatatttta | tattatataa | ataatataaa |
| 22081 | attatatttt | atattatata | aataatataa | aattatattt | tatatataat | aaaataaaat |
| 22141 | atatataaaa | tagcttatat | atataaagct | atttaagtga | aaattatagc | attgtcgggt |
| 22201 | tgggtttaca | ctgtaaatgt | aatgtgtaca | gtaactacag | tatgaagtaa | atggagataa |
| 22261 | atgaagcaat | gtagctgcaa | agtttccaca | ttttacatgg | tgagctacaa | tattaacact |
| 22321 | aagtggactg | tgataagtta | aggaggcata | ttgtaatctt | tagagaaatc | attaaaaata |
| 22381 | cagaaataaa | tggcttaaaa | gtcaatagat | aaattaagct | gaaattattt | ttaaaaatca |
| 22441 | aataatttaa | aaagaaggct | gaagagaaga | ctggaggaac | aaaaaactac | ataggacaaa |
| 22501 | aaagaaacaa | acaaaaatgg | tagacctcaa | tccaaccata | taaaaatact | ttaaatgagt |
| 22561 | aaataattag | aaggcagaac | tagaatagaa | ggaagaacta | gaatagaaat | agaattttaa |
| 22621 | aaggaaaaaa | tcctggaccc | atctataaac | cgtctgtaag | agaagcacat | ttttaaatat |
| 22681 | aaagatacag | ataggttgaa | agtaaatgag | tggaaaaaat | ctacattatt | atatggaagc |
| 22741 | ataagaaggc | tggagtgaat | atgttaatat | cagataaaat | aggcttcaag | aattgcggcc |
| 22801 | ggatgtggtg | gcttatgcct | ttagtcccag | cactttggga | ggctgaggtg | gatggatcac |
| 22861 | ctgagatcaa | gagttcgaga | ccagcctggc | caatatggtg | aaaccccgtc | tctactaaaa |
| 22921 | atacaaaaat | tagccaggca | tggtggtggg | tgcctgcaat | cctagttact | tgggaggctg |
| 22981 | aagcaggaga | actgaggagg | cggaggttgc | ggtgagctga | gatcatgcca | ctgccatcca |
| 23041 | gcctggctga | caagagcaaa | gctccatctc | aaaaaattaa | aaaaaaaaaa | aaaagaattg |
| 23101 | aatattttac | agacaattac | accccaaacc | tggagaatat | atttcttttc | aaatgtacat |
| 23161 | ggtatattca | tcaatacata | aaacataaga | caagtctcac | tagaatcata | tgaagtatgt |
| 23221 | tctctgacta | caaacgaatt | agaaatcaaa | caacaataaa | atatctagaa | aatcccaaat |
| 23281 | acttaaaaac | taaacaacac | acttctaaat | aatgtatggg | tcaaagaata | agtcacaaga |
| 23341 | gaaatgggga | aatatttgaa | cggaatgata | ataaaaacac | ataaaaattt | gtggaattga |
| 23401 | cctagatctg | tgcttaggaa | gaaattaata | gttttaaatg | tttatatttg | aaaagaagag |
| 23461 | agatctaaaa | tcaagaatcc | aaggttccaa | ctaaaggcac | tagaaaaaga | ggagcaaagg |
| 23521 | aaactcacaa | agttagtaga | cagaagtaaa | tactaaacat | aacagcagga | atcaatgcaa |
| 23581 | ttagaaaaca | aaaagtacca | aaaaatgtaa | tcaaaagctt | gtttttgaaa | gataaatatg |
| 23641 | agttgtatac | ctctagttat | tctgatcaat | aaaatagaaa | gggcacaaat | taacaatatt |
| 23701 | aagaatgaca | tgggagacat | ccctgcaggt | gccatggata | ttaaagatat | agtaaaagac |
| 23761 | tatgctaact | ttaaattaac | acattggaca | acttagatga | aatggacaaa | ttctttaaaa |
| 23821 | cagaaaatct | caatactcat | atatttatca | agaaattagc | ttctttatca | aaaacatctt |
| 23881 | cacaaagaaa | acttcagacc | cagatagctt | tattagttaa | ttctatcaat | acttaaggaa |
| 23941 | ataataacac | caaccacata | aaattcttcc | taaaactaga | ggaggaaacc | tttcctaact |
| 24001 | tgttttatga | ggccacagaa | accctaaaat | caaagcctaa | caaagatgtt | acaaaataaa |
| 24061 | agaaaattat | aggccaatat | cattcacgaa | catagatgca | aaatgcttaa | caaaatatta |
| 24121 | gtaaacagaa | tacaatatgt | aaaaaagata | gtatatcatg | atgaagtggg | gacatatccc |
| 24181 | agaaatttaa | ggttaaatta | acattcaaaa | atcaatcagt | gtaattcata | ttattaacag |
| 24241 | acggaaagag | acaaaccata | tgatcatttc | aacagatgca | gaataaacat | ttaacaaaac |
| 24301 | tccacattca | tttatgagaa | aaattagaaa | taacgttata | catagggcta | tcatatttaa |
| 24361 | tgatgaaaga | tttcaacttc | tcctgttaag | atacggaaaa | aggcaaggat | gcccacttcc |
| 24421 | accattctta | ctcaacattg | cactggaggt | tctagccagt | acaataagat | gacaaaagta |
| 24481 | agtaaataaa | caagtaaaca | aagtcatcca | gagtaaaaag | gaagaagtaa | actgtatcta |
| 24541 | tttttagata | acataattgt | ttacatagaa | aaatccaata | gaatcaacca | aaccaccact |
| 24601 | agaactaatt | catgaattta | gcagtttggt | agaatctatc | cttctaccaa | aggatagaag |
| 24661 | gtaaacatgc | aaaaatcaaa | tttatttaaa | aaataaattt | aaaaaataat | tccacttata |
| 24721 | atactatcaa | aaaacttaag | atacataggg | acMaatttaa | caaaatatgt | tcaagactag |
| 24781 | tactctgaaa | attacaaaac | attttggaag | aaattataga | aggtataaat | aagtggagag |
| 24841 | atataccata | ataatgggcc | agaagactaa | catgtcaatt | ctctccaaat | tgatctatag |
| 24901 | attcaatgtg | atcccaattt | taacctgcac | ctgttttgtg | ggaattaata | cgtttattcc |
| 24961 | aaaaatctat | atggaaatgc | aatgaacctg | cagctgcacc | atacattatg | gtggccaata |
| 25021 | actacatgtg | gctacttaga | tttctacgta | ggttaatgca | aattaaataa | aattaaaaat |
| 25081 | taagttcctc | caccacacta | accacatttc | aagggctaaa | tactcacatg | tgactagtga |
| 25141 | ttactcttct | taaatggtgt | agatgtgtaa | catttttatc | actgcagaaa | gttctgttgg |
| 25201 | acagcactga | cctcaaatag | ccaaagcaac | cttgaaaaaa | accccaaaaa | caaaaaacta |
| 25261 | gaggacttac | atacactacc | tgacttcaaa | acatactaca | aatctacagt | ggtccagaca |
| 25321 | ttgtggaatc | acatagacac | aggagaaaat | gttcaggact | taagaatagg | caaaggttta |
| 25381 | tttcacaagt | cacatgaaac | aaccataaaa | gtagaggtag | acttcatcaa | aattagaatc |
| 25441 | ttctgctcat | caatagacat | tctaaggaaa | atgaataggc | aagccacagt | ctgagagaaa |
| 25501 | atatttgtaa | aacaagcatc | tgacatagca | ctagttccca | ggaaacataa | ggaacccctc |
| 25561 | caacccaaaa | ataaaagcat | aaataacccc | tctcctcaaa | aaactggagt | gagcaaaggt |
| 25621 | tttaaaaaga | aattttccaa | aagaagatat | gcaaatgttc | aatatacaca | acaaacagtt |
| 25681 | ctcaacatca | ttagaaatca | ggcatatgca | aattaatcag | gcatatgcaa | attaaaacca |
| 25741 | caatgataat | accactacac | atctattcaa | ataactaaaa | ttaaaaacaa | tgaaaacacc |
| 25801 | aagtgttggt | agggtgcagg | gcaactggaa | ctctcataca | ttgttggtga | gaatgtaaaa |
| 25861 | tgatacagcc | actttggaaa | aataccttgc | agtttcctaa | aaaactaatc | acacacctgt |
| 25921 | gacccagtaa | gtccacaact | agatttctac | ttaaagaaaa | taaaaacata | cactcattca |
| 25981 | caaaaagact | tatgcaaaag | aaaatagcag | atttattcat | aatggcctga | aattgtccct |
| 26041 | gtgttcttta | acagaaaaac | agacgaacaa | ttttttttat | tattatactt | taaattctgg |
| 26101 | ggtacatgtt | taatatattc | ataaaacaga | agaagattta | gcaacaaaaa | agaccaacta |
| 26161 | ttaatacatg | gaacaagatg | gatagatctc | aaaaatatgc | tgagtaaaag | aagcaagacc |
| 26221 | aaaaaagggg | catatactgt | atggttccat | ttatatgaaa | ttttagaaaa | ggcaaaacta |
| 26281 | agctatacRg | ttagttagca | gcgtcagaag | aattgttgtc | tctggggatc | tgaggatggg |
| 26341 | aacaacttgg | gaagtagcat | gaggaaagtg | tctaagtgat | ggtaatgttc | tacatctggc |
| 26401 | taggctttgg | attgcagagt | atgaacttgt | caaaattcag | tatattcatt | tactactgtt |
| 26461 | gcataacaaa | ttaccacaaa | tgtagagact | taaaacagca | cacatttatt | atctcatagt |
| 26521 | ttttgttagt | cagaagtcca | aacacaactt | ccttgggtcc | tcttctcggg | atctcacaag |
| 26581 | cctgcaatca | acatgataac | caggctgtgt | tctcacttga | aggtttgact | ggggaaaaat |
| 26641 | cttccaagtt | cattcaggtt | gtcagaagtc | atttccttgc | agctactagg | ctgaaggcac |
| 26701 | tagcttttag | ctgggtatca | tctggagacc | atacttaggt | tctagagccc | acagttccta |
| 26761 | gaaagtgccc | tccatccttt | gcaatccagg | tttctcccag | aaggccactt | ttttcaccaa |
| 26821 | actcgcaaaa | gtctctggtc | ttgtctgcta | gcaagatgga | ggtgctgatg | gacagtgccc |
| 26881 | ttagaccttc | tagaggtcct | ctggtttgat | tgagaggatc | tgggaggcat | gccctcttaa |
| 26941 | aagatacctt | tttgtgacta | aatatgctca | ccttttgatc | tttcagattt | tagcaaaggg |
| 27001 | ttgcaaagtc | acaccctcta | atttttctct | agaccacact | gtcttaattt | gagaatctat |
| 27061 | tgccatctgg | agaggcttaa | aattttcaaa | atcatccagt | cctagttcct | ttctgtttaM |
| 27121 | gaattctctt | gatttatctt | tctctcctct | cacattttac | tgtaaacagc | cagaagagac |
| 27181 | tgggatgcct | tcaacacttt | tcttggaact | ctcctttgct | acataaccaa | gttcatcacc |
| 27241 | tacaagttca | actttctaca | taactgcaga | caacaatgtt | gctaagcttt | ctgtcactgt |
| 27301 | ttaacaaagg | ttctcccttc | tgtcagtttc | ccattacgca | ttcctcactt | cctcctgagc |
| 27361 | cctctcctgc | agtgtcctta | aagtccaggc | ttctattact | atcagtcttt | tcaggaagac |
| 27421 | ttaagctttc | tctattctac | tcccctgccc | actgctgagt | ttcaaaacca | cccaacgttt |
| 27481 | tcagatattt | attaacagcc | acaccccact | tccaggtatc | aacacttgta | ttagttttct |
| 27541 | attgctgtgt | gacaaattct | catagatgca | tttatgatct | catagcttct | ttagagcagg |
| 27601 | agtccaggta | cgacttagct | gcttccctgc | tcagaattcc | acaagtcttc | actctcctct |
| 27661 | gaaggctcca | ctgggggaga | atccatgctg | gagcctactc | ttacagttgt | tttgagaatt |
| 27721 | atttccttgc | agctgtatga | cccaggaccc | cagcattttg | ctggctgttg | gttggaggct |
| 27781 | aacctcaggt | tctgggggca | agacacagtt | ccttgctaca | tgggcttttc | caatatggtc |
| 27841 | acttacttca | tgaaggccac | aaggagtctc | tagctccagc | ctaccagcaa | aagggagtct |
| 27901 | tacaaaatgt | taacataacc | ataggagtga | catcccagca | cctctgccat | atgcatctgc |
| 27961 | tactggttat | gagcaagtta | taagggatta | cccaggatgt | gagtatcatc | aggggtcacc |
| 28021 | ttaatgtatg | tccaccgtac | tcagagaatg | cacacttcag | atttgggcat | tttacataaa |
| 28081 | aaggaaaagg | tagattggac | tctagatatg | catgctaaat | tgtttaggga | gaagtacacc |
| 28141 | gaaatgcatc | agtaaaaaag | atgaattgat | ggaaggatag | agggacagat | agatgaataa |
| 28201 | atatataatg | acacaagtgt | aataaaatgt | caatggaaga | atctaggtgt | gggtatctga |
| 28261 | gtatttgctg | aaaatttagt | tcaatatttc | tgtatattta | aaaattttat | aacaaaatat |
| 28321 | tagaaaagta | aatgtatact | tattaaaaag | agcacagaca | taaatgagtc | atctatttct |
| 28381 | ttatactttt | cagcattttc | tcactttact | ccaataatca | tgaattttgt | gtataatcaa |
| 28441 | gagttggggg | ccgggcacgg | tggctcacac | ctataatccc | agcactttgg | gaggccaagg |
| 28501 | tgggcggatc | acgaggtcag | gagatcgaga | ccatcctggc | taacacgatg | aaaccctgtc |
| 28561 | tctactaaaa | aaaaaaatac | aaaaaattag | ccgggcatgg | tggcgggcgc | ctgtagtgcc |
| 28621 | agctactcgg | gaggctgagg | caggagaatg | gggcgaacct | gggaggcaga | gcttgcagtg |
| 28681 | agctgagatt | gcgccagtgc | actccagcct | gggggacaga | gcgagactct | caaaaaNaaa |
| 28741 | aaaaaaagag | ttgggaaaat | gcatttagtt | tataaagcag | tcaatatatc | aagccagcga |
| 28801 | tctctccagt | ccattactga | gtctttccct | gctttcccat | gaatcagtca | ccaagagaac |
| 28861 | agaaagttac | ccccacctcc | aaacattctt | gaggttttct | actagccagc | tgtggagtga |
| 28921 | ttattcctct | gttcacctaa | acctctgaaa | ttgcacattt | ttaggatgca | ttatctcttc |
| 28981 | gacataacag | ttgcataata | gtaccacaag | ttgcatacaa | ttgctcttct | atttatatat |
| 29041 | tataaaactg | cctccttaat | attttagatt | ctcccctctg | gttctaatat | ttttaaattt |
| 29101 | ggtaaataaa | ttgaaattca | cgctaatcct | agtgattcag | attctaccat | aaaaatcaat |
| 29161 | actatgtaaa | actggagtgc | ttaaggctaa | atcaacaaca | tatgtagtca | tacctattag |
| 29221 | tgtcctgcgt | ttgtaggtaa | attaattagt | attacttgga | ccacatcata | ccacagccaa |
| 29281 | taaaaataac | agatgtttgg | agaatgaagt | aactggtgta | tacaggccta | gacattggct |
| 29341 | tttttgtttt | tgctttttac | aagagagaat | ggttctgtcc | agtcaagcac | attattaagg |
| 29401 | cattcatatt | taataagtgg | gtcctaacat | aggaaggaaa | gttctaaggc | tacttattgg |
| 29461 | cattaatata | ttatctatgc | tcccctcaaa | attatttaat | caataagtat | cagtcacctc |
| 29521 | ctctgtgtta | agtctattct | agagaggata | tagaaaagga | gWgagagtaa | atacacaaag |
| 29581 | tcattagcaa | agaatacaat | acagtatcta | gctatgtgct | aaaatcacta | acagttcaat |
| 29641 | acagcatttg | ttaggctaga | tactaagaaa | ttagcaacag | aatacaatct | tcctcctgcc |
| 29701 | ttaaagcact | cctggttctc | tgcagaacag | agctgagatg | taggacatca | gtaaatcaga |
| 29761 | cctagaaaag | tcaaggggtt | tacagagatg | gcaggaattc | gtgggaaaga | aagccaagat |
| 29821 | cttcaggatg | ggttggcttt | agacggcatc | agtaaaacca | aggaccagcc | ttcagtatca |
| 29881 | tctttagttg | tggggtaaaa | caactgcaac | cccaatgtta | ctgcctgagg | acttaacagt |
| 29941 | taacctggct | gccactggga | tgggcaataa | gctcaaacca | cagcatggag | ttttgggggg |
| 30001 | accatgtctc | tcgggacctg | gccaatatga | tgaggataaa | ggatgaataa | gtaaaccctc |
| 30061 | aatgatgatt | ctctcaaYac | tctcaaccag | tgttctcagt | gaaggttggg | gggcatcgtg |
| 30121 | gaaagctagg | gggaaacgat | tttgctgatc | acattatttg | agaggtgctt | tttgaatttt |
| 30181 | caactgtatt | cacctaaaat | aaatacatga | taaactgcat | atatttaagt | gtactatatg |
| 30241 | cttatttaag | tgttttttcc | acacgcacac | acagacacac | acacacaaca | aacctgcaag |
| 30301 | accatggcta | cactgaagat | gataaaaata | ttcctcactc | tccttcacaa | aggtctcatg |
| 30361 | cccacttgtg | atgcttgcat | gcccctcccc | tcttccatca | tcctcaggca | aacattgatc |
| 30421 | tgctgtcctt | atagattact | ttgcattttc | cagaatgtca | tctaagtgaa | ctcatattgt |
| 30481 | atgtattcta | tttgtctggc | ttctttccct | ctgcataatt | atttcgagat | tcatctatgt |
| 30541 | tgcagcacgt | gttaatagtc | tatttctctt | tattggcgag | tagtagtatt | ccactgtctg |
| 30601 | gatataccac | agttattcta | ttcatctgtg | aataggcatt | tgagttgttt | ccagatattg |
| 30661 | gcaattacaa | ataaagctgc | aatgagcatt | tgtgtccagg | tctttgtatg | gatgtatgtc |
| 30721 | catacataaa | tcatacacaa | atcatttctc | ttagatgaaa | tggaatggct | cgcactgttt |
| 30781 | tccaaagtgt | cttactcatc | tcacaagccc | acctacagag | tttcagatga | gccacatcct |
| 30841 | tgccaacact | tgctatggtc | agtctttaat | ttatccattt | caactggttt | aagtgctatc |
| 30901 | tcactatgtt | tttaatttac | agttccttaa | taactaatga | cactgagcat | cttttcctgc |
| 30961 | ccttatttgt | catYcatata | tcttctctgg | tgaagtgtct | attcaaattg | tttgcctaat |
| 31021 | tctttttttt | ttttttactt | taagttccag | gatacatgtg | cagaacatgc | aggtttgtta |
| 31081 | catagataga | catgtgccat | gtggtttgct | gcacccattg | acccatcatc | tgggttccct |
| 31141 | cccctcactc | cccatccccc | aacaggcccc | ggtgtgtgat | gttcccctcc | ctgtgtccat |
| 31201 | gtgttcatat | tgttcaacta | cctcttatga | gtgagaacat | gctgtttggt | tttctgttcc |
| 31261 | tgtgttagtt | tgctgaggat | gatggcttcc | aacttcatcc | atgtccctgc | aaagaacata |
| 31321 | atctcattcc | tttttatggc | tgcatagtat | tccatggtgt | atatgtacca | cattttcttt |
| 31381 | atccagtcta | tcattgattg | ggcatttggg | ttggttccat | gtctttgcta | ttgtaaatag |
| 31441 | tgctgcaata | aacataaatg | tgcatgtgtc | tttttttttt | ttaagttgga | gtctcgctct |
| 31501 | gtcacccagg | ctggagtgca | gtggcacgat | cttggctcac | tgcaYgctct | gcctcctggg |
| 31561 | ttcatgccat | tctcctgcct | cagcctcccg | tgtagctagg | actacaggcg | cctgccatca |
| 31621 | cacccggcta | attttttgta | tttttagtag | agacggggtt | tcattgtgtt | agccaggatg |
| 31681 | gtctcgatct | cctaacctcg | tgatctgcct | gcctcggcct | cccaaaatgc | tgggattaca |
| 31741 | ggcgtgagcc | actgcaccca | gcccacatgt | gtctttatWg | tagaatgatt | tatacccctt |
| 31801 | tgggtttata | cccagtaatg | ggattcctgg | gtcaaatggt | atttctggtt | atagatcctt |
| 31861 | gaggaatagc | cacactgtct | tccatgatgg | ttgaactaat | ttatattccc | accaaccgtt |
| 31921 | ttaaaagcgt | tcctatttct | ccacagcttc | accagcatct | attgtttctt | ggctttctaa |
| 31981 | taattaccat | tctgaccgga | gtgagatggt | atctcattgc | ggttttgatt | tgcatttctc |
| 32041 | taatgatcag | tgatgttgag | ctttttttca | tctgtttgtt | agctgcataa | atgtcttctt |
| 32101 | ttgagaagtg | tctgtttata | atctttgccc | actttttgat | gggttttttt | ttcttgtaaa |
| 32161 | tttgtgtaag | ttccttgtag | attctggata | tcagaccttt | gtcagatggg | tagattgcaa |
| 32221 | aaattttctt | ccgttctgtt | ggttgcctgt | tcactctgat | gctagtttct | tttgctgtgc |
| 32281 | agaagctctt | tagtttaatt | aggtcccatt | tgccaatttt | cacatttttt | gcaattgctt |
| 32341 | ttggcatttt | catcatgaag | tctttaccca | tgcctatgtc | ctgaatggta | ttgcctaggt |
| 32401 | tttcttctag | ggtttttatg | gtttggggtt | ttacatttaa | gtctttaatc | catcttgagt |
| 32461 | taatttttgt | ataagatgta | agaaagaggt | ccagtttcag | ttttctacat | atggtttgcc |
| 32521 | taatttttaa | ttaaattttt | tatcattgag | atttagagtt | ctttatacat | tctggataca |
| 32581 | agtctttatc | agatacataa | tttataaata | ttttctccag | ccttgtcatt | ttcctaagaa |
| 32641 | tatcttttga | agagcagaag | tttttaattt | tgataaagtt | caatttatca | atttgttatt |
| 32701 | ttatggatca | tattatggtt | gttctaacta | agaaatattt | gtctaaccca | agtcataaag |
| 32761 | gttttcttct | ataagttcta | cagctttaga | ttttatattt | tggactaggg | tccattttga |
| 32821 | attaatgttt | tttatatgct | tagatcaaaa | gtcccagcac | aaactgttga | aaagaatatt |
| 32881 | cttcctccat | tgccttgggg | agttgtctgt | ataagtgtgg | gtttgtttct | gaactttatt |
| 32941 | ctgttccact | gatatatttg | tatattttaa | gccaatactg | cacagggttg | attaccatca |
| 33001 | gtctatgata | ggtgttgaaa | tcaagtaatg | ctaatcattt | ttaaagttgt | tttggctatt |
| 33061 | ttaggtcctt | tatagttcca | aaggaatttt | agaatcagtc | tgtcgagtgc | tacaaaaaaa |
| 33121 | aaaaaaaaaa | aaatacttgc | tcggattttg | atgaggattg | tgttaaatcc | atatagcagc |
| 33181 | tttgggagaa | ctgacatgtg | aatagtaaga | acgcttcaga | tccatagaca | tactgtatgt |
| 33241 | cttctccact | tgacgtcttc | tttgatttat | ctcctcaatg | ttttgtatgt | ttcagtgcat |
| 33301 | acaacttgca | catcttctgc | caaatttatc | cttacatatt | ttatattttg | gatgctgtta |
| 33361 | taaatgatat | tcctgaattt | caatttatga | tcttttttat | tcttaatata | tagaaatgca |
| 33421 | attgatagct | gtgttttgat | tttgtataat | gcaaccttgc | taagctattt | gttctggtag |
| 33481 | cttttattgt | agattcatat | aatttttcaa | gacaaccaca | tcatttgttc | ataaggtcag |
| 33541 | ttttacttct | tcttttccta | tcaagttgtc | tttcgtttct | ttttcttgcc | tgattgtctt |
| 33601 | ggctaggatc | tctggtatga | taatgaatag | aaataggaag | agaacatatc | tgtgtcttgc |
| 33661 | tcttgacctt | agagtaaaaa | cattcagtct | ttgacacaag | ctaaagaatt | tatgtagatg |
| 33721 | cccaatatca | cactgaggaa | atcccctcga | ttcctagttt | gctgagagtt | gtttttagaa |
| 33781 | atggatattg | gattttgcta | aatatgtttt | tgggtaaaga | gaaggagggt | gtctattgaa |
| 33841 | atgaccactt | ggtttttctt | tctcagtttg | ttcatatagt | gtgtatatgt | gtatctacta |
| 33901 | tacacatatg | tatagtgtat | ctactataca | atgtagattg | attttccaat | gtaaagtcaa |
| 33961 | cattgcattc | ctgacaaacc | acacgtggtc | ataatgtgct | atcgtttttg | catattgttt |
| 34021 | cattcaattt | gctaaaattt | catttagcat | ttttgtatcc | aYgtttataa | aggacacttt |
| 34081 | ctgtgattcc | cttttcttac | aatgtctttg | tcttattttg | gtattaggat | agtactagcc |
| 34141 | tcacagagtg | agttgggaaa | ggttccttcc | tcttcaattt | ttaaaaaatg | tttgtagaga |
| 34201 | acaagtatta | tttctccctt | agatgtttgg | tagaattcac | ctgtatagcc | atttggcttg |
| 34261 | acatctcact | gtgggaaagt | ctttaacaac | aaattccatt | tctacagtag | acatagtgtt |
| 34321 | attcaggtta | tttaactttt | aattggtaag | cattgatgat | ttgtatcttt | caaggtattt |
| 34381 | gtccatttca | tctaagttgc | aaatttattg | gcataaaatt | tttcatatca | ttcccttatt |
| 34441 | gtattataaa | taactggaca | agctatagtg | atatcacctt | tctcactttt | tttttttttt |
| 34501 | tttttttttt | tttttggaaa | caggttctca | ctctgtcacc | caagctggag | tgctgtagtg |
| 34561 | caatcatagc | tcgctgcagg | ctcaacctcc | tagtctcaag | caatcctcct | gccttagccc |
| 34621 | cctgagtagc | tgagagtata | ggcacaggcc | accacacctg | gctaattctt | tatttttaat |
| 34681 | ttttttgtag | agactggatt | ttgcagagac | tgtgttgccc | aggctggtct | tggactcctg |
| 34741 | ggctttagca | atcctccctc | cgaagcctcc | caaagtgctg | ggatacaggc | ttgagccact |
| 34801 | gctcccggcc | ctttctcatt | tttgatactg | Kaatttgttt | cttctttttt | cctgatcaat |
| 34861 | ctgtatagag | ttttatcaat | tttattgatt | tatttaaaga | accagStttt | gggttcattt |
| 34921 | gttttctcta | ttgKctgKtt | ttattttttc | attgacagcc | actctggtct | tttttatttc |
| 34981 | ctttcttcta | cttactttga | gtttactttg | cccttccttt | ttatatttgt | taatgtggaa |
| 35041 | agcgagatct | ttcttttttc | ttaatatagg | catttcatgc | aacaaaattc | cgcttaagtg |
| 35101 | ttcctctagc | agcatcctac | aaattctgat | Rtgtagtgtc | ttcattcagc | tgaacacgat |
| 35161 | cccaatggtg | ggagctagaa | caattggagc | aacaaaacaa | ataacacagt | attggcttac |
| 35221 | agcccaaagc | ataagataaa | tatccatgag | tctatcctga | tagaaataga | tgattgagta |
| 35281 | aataactaaa | ggaggacaga | agagctgagt | ctcccatgca | gaacaactcc | aaatacttta |
| 35341 | tgtagattct | ctgccagcta | ggagacagag | cctagctccc | tgctcacgtg | ggagctgtgc |
| 35401 | ctagagactt | ccatccaaag | atgatggcat | tggaaagggg | taatgagtga | ctgtccagag |
| 35461 | aagaaggctg | acaaacacta | cgtccgtctg | gtgatgaagg | tcaacattaa | Yggtgataag |
| 35521 | ccatgttgat | ggtgggcacc | cttgggtggg | atgtgatgag | aatggatttt | atctctgtag |
| 35581 | tcttccttcc | aaaacccgta | agcccatata | atcacaagaa | aaacatcaga | caaatccgat |
| 35641 | ctgtgggata | ttccacaaac | tacctgccca | ggactcctca | aaactgtcag | ggtcctcaaa |
| 35701 | aataaggRaa | gtcagagaaa | ttgtcaaagc | caagagaagc | tgagagagac | atgatgactg |
| 35761 | aacataacat | ggtgtcctgg | atcctaaaga | gagaaaacta | aaacaacagg | aataaagtat |
| 35821 | ggactttagt | ttaaataatg | tgctcatatt | ggtgcattaa | ttgtgatgag | tatgccatac |
| 35881 | tattgtgaga | tgttaatctt | aggggaaact | gggtgggggt | agatgggaac | tctgtgctat |
| 35941 | ttttgaaaat | tttctgtaaa | tctaaaacta | ttctaaaatg | caagtttctt | ttcttttttt |
| 36001 | tttttttttt | tttttttgag | gtggagtctt | gttctgtcac | ccaggctgga | atgctgtggt |
| 36061 | acgatcttgg | Stcactgcaa | cctccacctc | ccaggttcaa | atgattctcc | tgcctcagcc |
| 36121 | tcccaagtag | ctgggattac | aggcacccac | caccacgccg | ggctaatttt | tttattttta |
| 36181 | gtgaagacgg | ggtttcatca | tgttggccag | gctggtctcg | aactcctgac | ctcgtgttct |
| 36241 | gcctgcctcg | gcctcccaaa | gtgctgggat | tacaggtgtg | agccaccgtg | cccagccaca |
| 36301 | agtttcattt | ttaaaaaaat | ctatgggata | tgttgaaaag | aaatataagg | ggaaaaataa |
| 36361 | aaatttgaga | attagaaaga | gacgtatata | tttctaaaat | tattgacatt | aggtatcgtt |
| 36421 | tcatttaagt | agtcaattta | attgtgttat | gtaacaactc | tttttaaaag | tcaatattat |
| 36481 | aatgtcaaga | cttatatatt | gaatcttatg | atgaaacttt | caaataactt | gacaatgttg |
| 36541 | caaaaggaac | agagtttttc | attccaaaaa | catttaggaa | atgaaagaaa | agtcatttga |
| 36601 | gtctagtggt | agagaggacc | tgagagaaga | gattgcacac | tccaccccag | ttccccatgg |
| 36661 | ccatttagac | agggagagat | ggacatataa | gtgattctta | cagctcccta | aacttgtgtt |
| 36721 | tgaaaactgg | agaagggata | agaactctag | tgttgctacc | tccctggacc | cctacctgga |
| 36781 | tggagtactg | gtgaggcacg | catccaattc | agctgatgat | cccWtttttt | tttttttttt |
| 36841 | tttttttttt | ttcagacaga | gtctcactct | gacaccaggc | tggagtgcag | tggcacgatc |
| 36901 | tcggctcact | gcaacctctg | cctcccgggt | tcaagcaatt | ctcctgactc | agtctcccKa |
| 36961 | gtagctggaa | ttacaggcgt | ccaccaccac | gcccatctaa | tttttgtatt | tttagtagag |
| 37021 | acggggtttc | accatgttgg | ccaggatggt | ctcgatctct | tgacctcgtg | atcctcccgc |
| 37081 | ctcggcctcc | caaagtgctg | ggattacagg | cgtgagccac | cgtgcccagc | ctgatgaccc |
| 37141 | ctttcttaag | gcttcctcag | agacagccga | gagccaggat | gatgctgcat | aaacagccca |
| 37201 | agagaactag | tcaactcagg | caatcaaatg | ccaccattcc | agcagagatt | gccagcacta |
| 37261 | gcatgaaact | gaccaaacca | gagttggaat | aagactacag | agactccagc | atctggggga |
| 37321 | gccctggtct | cttcWcgctg | aaRagcctga | ccactgcaac | agtcctgtgt | ggctggaaat |
| 37381 | ctgaggtctc | tggagaaggc | ttgaggaaac | cacagaggct | ctctcggaat | ggcacgattg |
| 37441 | cattttacgt | tttctgaatg | tgtggggcac | atatgctctt | aataaaatat | tcatatctgg |
| 37501 | aaaaaaccta | agtaactgcc | tataaacatg | tatctatcta | aaggtactaa | aaagaaatgt |
| 37561 | ttttcaagtt | attaaggtga | gccgatcctg | cttacgttgt | tagttattaa | agtaagttta |
| 37621 | atttaaattt | tattattttt | ataccatata | tattctatct | gcaaaggaaa | ggtaacatca |
| 37681 | gtgccagcaa | aaccctgaac | ctcatttcac | gattgactaa | cactcaaaca | ctcaccacat |
| 37741 | ccatagatga | ttctgtgccc | ctgttggcat | caggagctgt | cctgtgccct | gcaaggtgtt |
| 37801 | tatcagtatt | cctggcttct | acccactata | cgcaagtagc | acccgctcct | tgagtggtga |
| 37861 | cacaaaaaca | tctccagaca | ctgccaaatg | tcctgcgggg | agcagaatca | ccactggttg |
| 37921 | agacccaggg | tctgaaaact | acaaccgtag | aaatccggct | cactgcttgc | ttttgcaaat |
| 37981 | aaagttttat | cagaacacag | ccgtgcccat | tcatttctgt | tttgcctgtg | gtcccttcca |
| 38041 | caccacagtg | gcagagctga | gttcatgcaa | cagagacagt | gtagcccaca | aagtccaaac |
| 38101 | tatttaccat | ctggcgcctt | atagaaaaag | tttgccaccc | gtactctagt | ttctacctcc |
| 38161 | taagtctctt | ctagatccat | atttacctgt | ctcctgcctc | gctgttgcca | cccagcccac |
| 38221 | ccggatcaac | tgccacctgg | atttctgcaa | aactcccagg | gcactcctgc | ctctggtctg |
| 38281 | gctgcccttc | agttcatgct | tcacagagca | tcctggggga | cattttccga | aagcacaagg |
| 38341 | ttcatcatgt | cacttccctg | tttaatgcct | ttgggtggcc | tcccctgtgc | ttaagataac |
| 38401 | atgaggcccc | ttcacatggc | ctgtgaaatt | caaagattga | ccccatcaca | ttccagcctc |
| 38461 | taaaaggtgt | ccatgagaga | cttccttctg | tcctgcaagc | agggaaYaca | acaaaaccca |
| 38521 | gctctgacct | ccagacacga | atattcccat | ggaMctgtga | gcctgggttt | accctctgca |
| 38581 | ccgtgtggca | tggcatctca | cctgcgacag | gtgctccgcc | agaYgtcaaa | cagccacaca |
| 38641 | gctgcccctg | tgctgttagc | ttctcataca | tattcagtta | atgtgtcagY | tactccactc |
| 38701 | aaccccaaca | ttaaccatag | gagactctaa | aatttagtgt | ttgYtgaata | gtctcYgcag |
| 38761 | cagggatttt | ccagtttttt | gataatgacc | caaaataaga | actgaatata | caaaacatcg |
| 38821 | taatctagta | cacacatgct | tctgtgtgtg | tgtgaacaca | tctgagacat | acatttcatg |
| 38881 | atagaatatt | tacctttagg | ccgggcacgg | tggctcacac | ctgtaatccc | agcactttgg |
| 38941 | gaggccgagg | cgggtggatc | acaaggtcag | gagatcgaga | ccatcctggc | caacatgatg |
| 39001 | aaaccccatc | tctactaaaa | atacaaaaat | tagctgggca | tggtggcacg | cacctgtagt |
| 39061 | cccagctact | tgggaggctg | aggcaggaga | atcgcgtgaa | cccgggaggc | ggaggtaaca |
| 39121 | gtggccgctg | cactccagcc | tgacaacaga | gcaagactcc | atctagaaaa | aacagaaaaa |
| 39181 | aagaatattt | acctttacta | gtaatgtttt | ttattgtttt | ctatttcatt | gtttaaattt |
| 39241 | tggtcacaac | tcactaaatt | acttcaatta | acctactaat | gtgttgtgat | gtacagtttg |
| 39301 | agaagcactg | ccctgcagct | tctagcaagg | tgacttgatg | aattaactaa | gtgatgagct |
| 39361 | ggttatgaga | atatccaaga | aacagttgga | agggcctgga | tctttagctc | tgggtctttg |
| 39421 | gactttccaa | tttgttagac | tttgtggcaa | atgacccgat | cctccctcac | aaatgccgaa |
| 39481 | tccctcaaaa | gggccccggc | agaaagagga | atggatacaa | aggtRctgtt | gcgagtgtgt |
| 39541 | ttacccaaat | ccttgggctc | ctgcaaaaac | cctgtggatt | gacaacttca | agggagccag |
| 39601 | aaatgaccaa | agattagctc | aaagtaatcc | tccagaaaac | gactgccaag | agaggctaca |
| 39661 | aatgtattcc | cccaaaaatg | agaatacatg | gataaaagca | gaaaaatttt | taaaacttag |
| 39721 | aatctgtaaa | aaacagcgtg | gggcactgtg | cattggttac | cactgaatgc | acggctgtag |
| 39781 | ggatccggtg | ggctcaagtg | ggatctggtg | ggttccggtg | ggctctggtg | ggctccggtg |
| 39841 | gggtgggcac | aaggtaccaa | ctaccttcca | tcctgctgac | cttggctggc | catctcaagt |
| 39901 | taggcttacc | ccgctggcca | gcctaactcc | tgagcagtcc | ccaagcttcc | ctgccctgtc |
| 39961 | cccttacaca | ccaagatttg | actttataaa | ttatcaactc | acattcccca | aatgaagcaa |
| 40021 | acttaacttt | gacctgttag | tagataccat | atgcctcaag | gtggtttgta | aacttgaatg |
| 40081 | ggaaaaaaat | ttctaccttt | attttcaata | ctttctaaca | gacatttaga | acacttgctt |
| 40141 | caattataaa | cgtaggcaag | aaacctcagt | ggtatttgct | gttcctgtga | ctttgctgtc |
| 40201 | aatagaaatc | acaaatgttt | tcacacatta | aagctgttgc | aggtatctcg | aaatatcact |
| 40261 | cgcactcatc | actactccga | aatcgtggta | gttgttagat | ttataccact | cgatcttatt |
| 40321 | taagatatta | ataaagaagc | acatatgaat | atacatcaca | aatgtggctt | ttgatatatt |
| 40381 | gtcaccttat | ttcaatagaa | caggtttcct | ttgtgactct | tggtacttca | ttcatttaaa |
| 40441 | aacattagtc | tgagaaaggg | tctgtaggct | tcaccaggcc | acaaaacggc | gaccgtgaaa |
| 40501 | tgggtcacaa | cagaaaaagg | aatctttgat | gaatgcctcc | ataggccaag | caatttgcaa |
| 40561 | aaaaaattat | ttcttcttat | ttcagctact | ttatttttta | atttttaaaa | atatttattg |
| 40621 | acttgtattc | tccaattcaa | aaaataattt | gatcttatta | taacaagtga | aacaatgcaa |
| 40681 | gRaaaagata | tacaaaggca | gtctatcttg | gaagtttgat | acacacatca | caatggactg |
| 40741 | cataacaaca | tagattcaaa | taaagtgtta | ggaagccagc | tcagagaaag | acagtgaggc |
| 40801 | tggcaggtag | aagaattgct | agtgatggtg | tttccattgt | ggaccaagta | agcagtcatt |
| 40861 | cccataagat | gtgagcaggc | gccctgtgca | aaaggattct | gtggtcacag | tggatgagaa |
| 40921 | aatgctcggt | taatcaaagg | cacactgcat | tttttttaat | acactaaaat | gcactgagaa |
| 40981 | tctccaaagg | agaaaatata | atatgcaagg | tttctgaaat | acagttgtct | acaaaatctt |
| 41041 | cctctctcct | ccccaaccct | ccccaagaac | tttcttatat | tccccagaac | atggtttggg |
| 41101 | aattgctgaa | acagggtaat | gtaagtttca | tcctgacctc | agccatttaa | aacatgcagc |
| 41161 | caacaatggc | tacatctttt | Rtttttctct | ccttaggtca | gtaaggagat | atgagatttt |
| 41221 | ttgtcttgcc | agaattcttt | atttatttac | attaaaaacg | agaaaaaata | tataaccacc |
| 41281 | aacaaaggtt | tcactctttt | ttttttgtac | taatatactt | cagactcagc | ttttaccttg |
| 41341 | ctggagggag | aacttaatta | cttacaggtt | tttctagaac | agtccttagt | tcaaccctac |
| 41401 | cacagtttac | actScagccc | acattacaga | attccactgg | catttggctc | tccagtctcc |
| 41461 | ctctttagag | tggtaataca | gtgctctcag | ggttatacac | agagaagttt | agaaaatacc |
| 41521 | agccagttga | gactagttgg | cccctccact | cagaaagctg | cagaatgcct | ttcacccagc |
| 41581 | cacaccaaaa | gatgtaagga | gcaaagagct | cccaccagcc | acgcacacaa | aggacgtgta |
| 41641 | tgctcacctg | gaaatcRgtg | gctaaagagg | tagcaccctt | gcggggacca | gaagggaccc |
| 41701 | aaagaggcct | gaggaaagtg | aaggaaacta | gaaaagacag | cagagtctca | ctcctataag |
| 41761 | taaacttcaa | acttgctttt | aaaatgatta | gcaacacatt | ctggtttgtt | tatagtctat |
| 41821 | acatgatctc | gcagagtcaa | gaaaagacag | acttccctct | gtaacctttc | cacttgcacc |
| 41881 | aatgatttcc | agatcatcgg | tgcctgaagc | caatcgcctg | cttcaaagag | gcatcctttg |
| 41941 | caagagcact | tgtgcgttca | gagttccagt | ggtaccaagg | atgacagtga | ggcttttgat |
| 42001 | agtgataggc | ggcttaatga | agagagccag | gacagcatgc | ttgctctgcc | cccactcgtt |
| 42061 | cacttgctcc | ctaacagtga | atcgggggat | ggtctgaggc | tctccactcc | ctaaccagag |
| 42121 | cccactgagc | ccagactgcc | acctcgaaaa | tgggtgatga | ccatcgtttc | cttgaccaga |
| 42181 | caggcctcga | catcagcctt | tctatagaat | gccagaaatg | gcagagcctg | cccttgggcg |
| 42241 | aaaacacttt | ttagataact | aatcagcaat | aatgctgcaa | ctgacctgcc | tgcaggcttc |
| 42301 | agcggctcca | gatctaaatt | accctaattt | ttctccccca | aaattaggca | taatattata |
| 42361 | atttcaagga | acgcaagagc | catttctccc | atcattggat | accaagctca | agatgttaca |
| 42421 | ggaaaaagaa | atagctttta | ctgctgatat | gagaatttta | aaagagagac | aagtgtgagc |
| 42481 | aaacaaaacc | tgtcacatca | aatactctgg | caaaaaaaaa | aaaaaaaaaa | agctagaaaa |
| 42541 | aaaatgccag | aaatgctgaa | atctaaataa | agtcatttat | ttgttatttt | aaccccttca |
| 42601 | ctgtcagagc | tactctggca | taaggctagt | taattctcca | gaggtgagct | ttattaagga |
| 42661 | cagtgccctt | attcttgcag | ccattgtttt | cttgtcacac | agttctcttg | attatctggt |
| 42721 | cccttcaagg | ggttccacat | acaaatgggg | tgctgttgat | gctccttggg | ccgtacctcc |
| 42781 | ttttaaagta | tgattttttc | agagaatttg | attttatcca | Rtttccacca | tgctaagcaa |
| 42841 | aaacactaga | ctgtgagatc | ccgaagggca | gcagccccgt | gaccctcatg | gttctggcac |
| 42901 | atggaaggta | ttcaaagcat | gagatggaaa | ttgctttttg | aactctgtgc | cttaggcagt |
| 42961 | taacatgcaa | gcaaagataa | gatgccttcg | gcaggggagg | ctatgacaac | caacgagaaa |
| 43021 | aatggaaaaa | caccaattgg | atgggtctgc | agttgatcac | ttgctcttcc | ttggtcaagt |
| 43081 | tcatgagcct | gtctcctgtt | tcgaggatac | atgcttttat | aaatgttaaa | taagctaaca |
| 43141 | ctgctgaaag | ggcattgcta | atggaggtct | gtggaaatag | agggaaatat | ttctaattag |
| 43201 | aaggtatgga | ttgggcactc | actgtgtgcc | aagcactaca | gtggaccctg | aaatgagtca |
| 43261 | gccacagact | cggtcctcca | agatccccgc | tcctccagct | ccattcattt | tagcccgatg |
| 43321 | caatgaggct | tctttctgcc | ttcaggaatt | gcttgggcaa | tggttcccag | gaccttctga |
| 43381 | ctcagaggat | tccacagact | tttcagccct | ttcttctggg | aggtctccgt | ggccttccca |
| 43441 | ccactgcctc | agtcttgtgg | tggtgccgct | ccccatgggg | gcttctccca | ccctcccggc |
| 43501 | tgctcctccc | ccacctcctg | agcccacctc | tagaggctgg | gtcatctcgg | gctgttcctg |
| 43561 | cggtctcttc | tgctctctaa | atacccactg | tccaggaacg | cccaccctgc | ggtggcctca |
| 43621 | gctcccacct | acaagcccag | gacttttctc | ccaagtccta | atcttattaa | atatgctgcc |
| 43681 | tgcctgcagg | ctgtattcac | cagccatctt | ctcgccttcg | cccaggagtt | gataccacca |
| 43741 | ctgagagggc | actgccaagc | acctatgcag | ggaggcccgg | gtccctctgg | gccctgtccg |
| 43801 | ggccacatcc | tcagcatttc | tctccgtctc | aacagctcaa | gccctgtggt | acctcttgct |
| 43861 | gagcctctgg | ggttctccca | gaaggccagc | cccaccctcg | tctgacccca | cagtcctgcc |
| 43921 | tctccagtgc | ggctagactg | tcttccccag | ctgacgccca | tctgcggttc | cccacggcca |
| 43981 | gtctcaacag | tctcctgcct | gcacccactc | ctcagccttc | tccattggag | gctcccctcc |
| 44041 | tcagacacac | aggcctgtct | gctgccccat | cgtctctgcg | caggctgctc | tctcggtgtc |
| 44101 | cctggcccat | gcccactcca | cgctccaggg | ctcagcctcc | tctcccgctc | tccaccccac |
| 44161 | ccttcgtctc | ctgccctcca | ccccacccct | cctttcccgc | cctccaccac | acccctcctc |
| 44221 | tcgggctcct | gggcaccccc | ccgccacctg | cgtctcctgt | cgtcagcaaa | atgcactatt |
| 44281 | tgctcatcca | gtgcccacag | tttgcccacc | ggacggccct | gctaggtggg | aagctccttg |
| 44341 | caggcaggaa | ccccatctcc | ttgactttac | tttggaatcc | ccgcagcctc | atacggggct |
| 44401 | gaggcaggtc | cttccgtaaa | atggaactga | atgagcggcg | cttaatccat | ccgccaaagg |
| 44461 | ccagtctccc | ttgggttttc | aacaggtaac | atgagctttt | aaaaatgagt | cttgttaaat |
| 44521 | gaagtgccct | gattttcaaa | gttatgccca | cacagaacga | cagggcaggg | gctcccttcc |
| 44581 | agaatgacag | agccctgggg | ctcgtctgac | cacttctcca | cccccagatt | cctctcatca |
| 44641 | cccgatgcct | ttactttggg | actcttccag | gtcgttcctc | acctcgtgca | gcattgctgt |
| 44701 | gagtgggcga | caaggaacct | cgtggtctcc | gtgtgctttg | cggggaccac | ctcttcgcag |
| 44761 | gggccgccac | ctgcctctcc | ggcgctgcat | ccttagcatc | cccactgccc | ccggatctcc |
| 44821 | ttcagggagg | tgcggcggca | gagcggcccc | agcagcctcc | tcctgtggcc | caggcgcacc |
| 44881 | aaggcgagcg | cggccacgag | ttccggccca | gcgccaccca | gactctttga | tgtgggtttg |
| 44941 | tgtgtgggag | agtaaaagat | gcacacaccc | tccgcaagtc | tagaatttgt | ggtttttgtt |
| 45001 | atctcacaac | ttcatatttg | gaagaagtat | tttaatgtct | tatgagttgt | gaataattat |
| 45061 | gtaattctgc | cactttctca | aaaccaagat | ttttcaaacg | gactgctcta | gtctggagct |
| 45121 | gacatcctta | agagaacttt | gctttttttc | ctgtgggttt | taagcaagag | tgtgccaaat |
| 45181 | gaattctttc | gtccgcttaa | aacagttcat | tagggggaac | catcctgtaa | aaggaaagga |
| 45241 | aaggaaagga | aaatccttcc | ttcttcaaat | gaattctcaa | aaattacttc | tgagatgcaa |
| 45301 | atgctgcctg | agtgtttgag | ctccgtgaga | gagtccactt | cccaacttgt | tttcagtctg |
| 45361 | ctgttgggtg | ctactgaatt | tcttaaacat | tgtgtttctc | ccttatctgt | gaattagcca |
| 45421 | tgtgttcttt | ggaatctctt | cctgggtctt | cgttattctt | cctcagttat | ttaaRaacct |
| 45481 | agggaaggcc | cggcgtggtg | gctcacgcct | gtaatcccag | tactttggga | ggccgaagcg |
| 45541 | ggcggatcac | ctgaggccgg | gagtttgaga | ccggcctgac | cgacatggag | aatctaaaaa |
| 45601 | tgcaaaatta | Sccgggcgtg | gtggcgggcg | cctgtaatcc | cagctactcg | ggagactgag |
| 45661 | gcaagagaat | cgcttaaacc | tgggaggcgg | aggttgcagt | gagccgagat | tgcgccattg |
| 45721 | cattccagcc | tgggcaacaa | gagcgagact | ccgttaaaaa | aaNaaaaaaa | agaaaagaaa |
| 45781 | aagaaaaaac | cctagggaaa | gggtcacgaa | gactgcatca | tcaaatgaca | ccatgaactc |
| 45841 | ctcaagggtc | tacccattgt | tttaacttac | tgcccaaaag | gtacttctca | ttcgaatagc |
| 45901 | ccccattcta | cagtcatctc | tatcaatcat | catgtcactt | gatcatgaca | tcgttctaag |
| 45961 | cacctgtaac | atcccagacc | ctgtctgaag | caccaggaat | gctgggtgag | cgggacagaa |
| 46021 | gggaccacag | atcctcaYgt | tgccttatca | agtttagact | ctagtggtcc | cgatggctga |
| 46081 | tctcatgaca | ttcaaatagg | aggcgatcat | ttccttaaat | acaaacacga | gattgtcaat |
| 46141 | agttaggatg | tgcttatttt | tcctccaggg | cataagattt | tttttcttgt | atgtatttca |
| 46201 | tatccctagc | tggagaaata | tcaaaagaat | ctgaatatca | ccatctggaa | gttgtgccat |
| 46261 | ggactccagt | gggcaggatt | cgagctggga | ttctcttctt | cctctagcag | tgtatttctt |
| 46321 | ctgcttaaaa | tgagcacaaa | cacRtctaat | tccctaatgg | accaactcag | acctaaaagt |
| 46381 | ctcttattct | ttgcccgcct | tcctctaccc | acatggattc | ctgggattct | ctaaatgcag |
| 46441 | atggcaatgg | ggagggctgg | ggattcccat | caaggatatt | tgatcatcgg | tgacttcact |
| 46501 | taaccaataa | atcaaacgtg | ttgaaataca | cacatgtcag | aaatgtggta | tgctgttact |
| 46561 | cactcaaaag | tctgttggtc | tgtcttggtt | gcgattgggc | aatgaagccc | tagggactta |
| 46621 | tttcggcttc | aatagtctgt | aaccctcaat | caatatttcg | ttaagtgtYa | gtattcattc |
| 46681 | ctagtatttc | cccaagttta | acttgttcct | tttgaaacga | ctggtattct | tatgagccag |
| 46741 | aagactgtta | tttgaaaatg | tttccttttt | tttttttttt | tttttttttt | tttttttttt |
| 46801 | gagacggagt | ttcactcttg | ttgcccaggc | tggagtgcag | tggcacgatc | tcggctcatt |
| 46861 | gcaacctcca | tctcccaggt | tcaagtgatt | ctcctgcctc | agcctcccga | gtggctggga |
| 46921 | ttataSgcac | ccgccaccat | gcccagctaa | tttttgtatt | tttagtacag | acggggtttc |
| 46981 | accatgctgg | ccaggctggt | ctcgaactcc | tgacctcagg | tgatctgccc | gccttggcct |
| 47041 | cccaaagtgc | tggcattaca | ggcgtgaaYc | accatgcccg | gccaatgttt | ccttttttaa |
| 47101 | accttcatta | tatatcactt | tcacatttag | aactctcttc | gcctccatct | agaaatattt |
| 47161 | tcgttttctc | tggatgtgct | tctgtctccc | gctggacaag | cctggcactc | cgggaagagg |
| 47221 | accctgtgta | tcacgacacc | tggcacacag | aagaagctca | ataggcactg | aatgattttt |
| 47281 | ttttaacatt | gaRgttgttt | ttagctctcc | cctattagcc | gttagttagc | agttcacatt |
| 47341 | gtatgtggag | tctgtattta | taatataaca | ttagttctgc | cctaaaattc | cacaggacaa |
| 47401 | attccatttg | gaaacgtcct | ctaattgtca | tgcagtggtt | ctgttcaaac | tgcgggaaca |
| 47461 | tttctaaatc | ccacagctct | aacaggctgc | ctgcccatta | cagaaggaga | cttcaggcgg |
| 47521 | aaattcaaaa | cacttgctac | tgtgacatct | gcccagcagt | actaatttac | atccatttgt |
| 47581 | atttattatt | gtatagtttg | gRatgtaata | agatgctgcc | atcaccccca | caagcctctg |
| 47641 | gaatactgag | gagtggtatt | gcatgtcatg | aagcacgcag | gctcttcgag | tttgacctct |
| 47701 | gctttgaatt | cccacttgac | ccaggatgag | gaagtctgac | tgagcagcgg | tttcctcatc |
| 47761 | tgtaaaatgg | gtataacacc | agcacctatc | ttgctggatt | ggcacctgga | ataaatgaga |
| 47821 | aagcacaggc | caagccctcc | agcattggac | acagtcagca | tgtaattaat | gctagctctt |
| 47881 | cttattaaat | tcctttagct | taaagacaaa | gtaatcagag | acacttacag | aattacagaa |
| 47941 | gagtttatca | tgccgttctc | tttgaggaaa | acagttaagc | agttttaatc | cattttataa |
| 48001 | taatgtctta | cataatcctt | actcagagct | ttaatcaaaa | aggttgtctt | ttaataaaca |
| 48061 | agattcacat | ttagactctg | tctacacaca | caagccagtt | ttaaatgtca | cccagattaa |
| 48121 | gtcaaacaac | cgataattaa | caatgtttta | catgtaactg | gttttgtttg | tggacccagt |
| 48181 | cctaaacatt | tttttaccaa | gtaaccttaa | atatgtcatc | agatgggttt | ttagtagaca |
| 48241 | tatctgaacc | taattttgta | gcttaaaaat | agtatatttt | attcactttt | tttaatatta |
| 48301 | aatatgtagg | atattttaat | acttggccaa | ttcaagtgtt | gataagtaac | atctgtcaac |
| 48361 | atttacaata | ttatctagct | cagttatcca | gaataaactg | agaatcttct | ggatttttaa |
| 48421 | aacaattctc | aggccctgat | ttactaggag | agtttgggag | gacctttatg | cagacaaaca |
| 48481 | actcatagtt | taagttggct | tccgctcctt | tctaacacaa | agataaccgc | gaggtggaaa |
| 48541 | aatatcactt | tgtgaaaacg | acatcttagc | aaaacagatc | tgtacaaggc | agaactggac |
| 48601 | aaaatatgtt | gattcacatt | accactgact | tatatcagac | attctatcat | tttatctgcc |
| 48661 | tcgagcattt | atcaaagtaa | actgctgcag | agtgcaactg | cctccttgtc | ggccgggaca |
| 48721 | ggtgttacca | catctatcgc | ctcgcctgct | tgtaaatggg | gatagcccgt | tcctacagct |
| 48781 | aatcctggca | acacaagctc | accttcacac | agcaggattg | ggaggctctg | gaaggttcta |
| 48841 | aggccaaaga | cagagccagg | tctgcttgga | agccatctgt | gatccccgtt | cctacccctc |
| 48901 | caccttgctc | atgcctccct | ctgcagcgac | cagcctggca | ccaaaacagc | acctgccagg |
| 48961 | ggaacttgag | gatttggctg | gcctggggct | agagctgtcc | attcccacca | agaggaagag |
| 49021 | gcccacaacc | ccagtggcct | ctgaggccag | cagagcctgt | ggtgccacaa | gggaacagcc |
| 49081 | tgtgagcctg | tcctccactg | cgccctgcgc | ttctgactca | gactaacaca | ccaggatttt |
| 49141 | ccatttcaac | agcagtgtct | gtggtcctct | tttctaagtg | aaagagtcca | agctaaggtt |
| 49201 | ggctagaggg | atccttgcag | ctccggagca | ggtgtagggc | tgataccagc | cctctgctgt |
| 49261 | tatttgacag | cttgcaaaat | gtacaaactg | gccagataca | ggtgtgtgct | tgcatgtgtg |
| 49321 | tgcatacaca | cacatatctg | aatatatatg | tgtgtgtatc | tacacatcat | actaataaac |
| 49381 | taataacttc | catgggcaat | aaattttcaa | atttcttaag | gattcagata | aggagaatgt |
| 49441 | atataatcaa | cacattaatt | attatgcata | cataaacata | ctaatactct | taatacgccc |
| 49501 | tttgaaaaaa | tatattcaac | cagcttaatt | tttctaattt | tgtttttgtt | aaatcctgtt |
| 49561 | ttcttattaa | ctattgattg | ctaagcagca | ggcagtgtgc | taagtatgtt | acctggatta |
| 49621 | tctggttaat | ccttccaata | gctacacggt | gaagacacag | atgtccacat | cttctgcaga |
| 49681 | taaggaaact | gaggggtaat | aataaataat | ttgcacaaca | cagcacaaag | ctgaggagcc |
| 49741 | aacactggac | ctgacgaagt | cccattctgg | aagccaaact | cccaactgct | aagctctgct |
| 49801 | tgaattctca | ttgagcatct | Ygcttcttaa | aagtttcaac | aactcagcag | tctataatcc |
| 49861 | aactcgcctt | ctccRcaatg | ccaaaaggta | gaagtgacac | tttctttttt | ttctttcttt |
| 49921 | tttttttttt | tttttgagac | agagtctcat | tctgtcaccc | aggctggaat | gcagtggcgc |
| 49981 | gatctcagct | cactgcaacc | tctgcctcct | gggttcaagc | gattctccta | cctcagcctc |
| 50041 | ccaagtagct | ggggctacag | gcacacacca | ccacacctag | ctaatttttg | tatttttagt |
| 50101 | aaagaggggg | tttcatcatg | ttggccagga | tggtctcaat | ctcttgacct | tgtgatccac |
| 50161 | ccgcctcggc | ctccgaaagt | gctgggatta | caggcatgaa | ccaccaagcc | tggcagtgct |
| 50221 | ttcttataag | ggaggtgctt | tccctatcca | tgagggtatt | tagggaacca | tataaaaata |
| 50281 | tatatgtaag | ttgtataatg | gtaattgata | gacataacac | agttagttaa | aaatggcgtc |
| 50341 | aaacaataga | ataactactt | tccatccttc | atagattcaa | tactcattta | gctgaggttt |
| 50401 | atcattggcc | aacatcaggg | ttgagctctg | ggagggagaa | taaaaagtag | taggcaccct |
| 50461 | cttctcccca | agaactcaca | ctgatcatac | agataagatg | tgtgtggtat | aacacttgct |
| 50521 | ttccatgaaa | ataaattgat | taatcacatc | gaaaatagag | gaacaaataa | tgaaagtgtt |
| 50581 | tcttagggca | aaaaataaga | gcgctggggg | ttttcatacc | ctaaaggtag | tcctttttct |
| 50641 | aacaaccaaa | gaattggcca | tgtctactcc | tgacatatag | ccgtcctcct | ttgctaccag |
| 50701 | gaataaacaa | caatttgact | gagccaaata | gcagatgcaa | ttttgcatga | agctagtaat |
| 50761 | actgtttatg | ctttactatt | tttaatatgc | tataaaaact | atttgtcttt | tcaaaaaaaa |
| 50821 | atttttttta | cagatttaat | gccactgcct | taactttaaa | ccaatggggt | agacatttct |
| 50881 | ccttctcttt | tcaggggcaa | attttggaat | tattttaaaa | tcagtctgat | gcctcacaca |
| 50941 | tcacggctgc | taaacttggg | tatttgtttt | tcagtgcaat | gagcttcatg | ctgaatactg |
| 51001 | atttgaagtg | tggttcacca | cacagactta | aattgtcctt | cccacaactt | tatctgagaa |
| 51061 | gcatgacaac | ggtgacaatc | acaggactag | ttttattggg | taagactatt | ctatgtgcaa |
| 51121 | tttattctga | caggctccac | aatttttaag | tgcaattaaa | tcctaagaat | ttgcccaNaN |
| 51181 | aaaaaaaagt | ctaccacttt | ttaaaaaaaa | ttttttttga | agaaagcaga | aaaaacagtt |
| 51241 | gaattgaaca | actaattact | aactggttgc | tctcttgaaa | aaaaaaaaaa | gatatttgac |
| 51301 | agagcctcaa | aatcgatttc | attatctaga | caggcaactt | tctgggtctg | agaaagagaa |
| 51361 | ggcttccagg | aggtctgcag | ccacctgctt | cagccactgc | tggtatccac | atcttcaaag |
| 51421 | cggaggttta | gccacaccca | gaggggggaa | taacacttgc | agaaaacaac | gctcagaaat |
| 51481 | tggcgtcacc | tgattcccca | cagcagagca | gaccagctgt | ctcctgtaca | ggtggaagca |
| 51541 | gcttgcacgc | ttcctgccat | ccgcatgctc | actcctccct | cacagtccca | gaaatggaat |
| 51601 | cccaagaggc | cgctcaggca | agccagatag | agccacccat | gtgatcaagc | attcagggca |
| 51661 | tgagggcccc | cactaccatg | gcccggaaaa | tacatgcatc | aacatgactc | atgtcatttg |
| 51721 | cttgcccttg | gtgaatttca | cgttgcattt | ctaacccgaa | gctagggtcg | cRattgtctg |
| 51781 | gggcgtagag | tccctaccac | ttctaggtat | tccacattcc | cagtctctat | tcaacaagag |
| 51841 | gctaggctga | cactgaagca | gctatccagg | ttattcttca | gaaatcagat | atttttaaag |
| 51901 | tgatgccaag | tKacacctaa | catcatagaa | tattctcttc | atgtgaactt | aattcagtag |
| 51961 | aaaacatctt | cggccagaca | cctgcagctg | gcataatctg | gctatctggt | gcctgctgct |
| 52021 | ccctctaccc | ttgctgctgc | cccgacctgc | cccatacccc | agcccccatt | ggggtcgacg |
| 52081 | gtttcccaga | gatactcagc | cttttggtgc | tcctctctcc | tcctggtata | ccccatgcat |
| 52141 | taagcattga | tcctcccatc | ttgtgtgccc | ccaagacatc | taccactgtt | aacactaaaa |
| 52201 | tggccttgcc | tgtctcaccc | aatttggctc | cgaactcatt | gaggaccacc | tYacacactc |
| 52261 | cccagcacct | cacacagtta | ctggtacaga | gcaRgctccc | ggggatgttt | gctgaaRgtc |
| 52321 | tttttttccc | ttctgagctg | ctaaaacaac | aggcattaaa | cagtcacctg | ggccacattg |
| 52381 | ttgctgtgaa | atgtccttct | ctgcagatcg | taagccccgt | gacgtgatgg | cagaaaccgc |
| 52441 | gccctccttt | tgtgccctaa | tacctgggcc | agtgctctgg | gcctattaga | tgccaataaa |
| 52501 | tgtttcttga | ataaatgaat | taaagacaat | actgatacag | acatcctgag | agaaagccga |
| 52561 | aaaggtctaa | aaatgaaggc | attccaacat | ccatgtgcac | agaacattgg | gaaagctgtc |
| 52621 | catcagcgtc | tctcttttgt | gacttcctat | taaggtgctc | cgcagaactt | gaactgacct |
| 52681 | attgcagtac | agcacagtac | tagggacaca | ggccaggtgg | aaagagatta | cttcatctgc |
| 52741 | ttgccatgca | aagcagggct | gaggatccga | ggcctcaaca | tggagagtgg | gaccccaggg |
| 52801 | ccctcacccc | tcccttctca | ggccatttgt | tcctttttcc | tggatgacca | cctcccacct |
| 52861 | gtcaccccct | gcctttgcct | tccacttggc | caatgctaaa | tcaccctctc | agactcatct |
| 52921 | caggtaccac | ctctccaagg | acgcgttccc | tgacccctct | gggcctggcc | tggtgtgaat |
| 52981 | gcatactata | ctgttaccct | cactggacag | agacactctc | ttcctttttt | tttttttttc |
| 53041 | agacagggcc | tcactctgtc | gcccaggctg | gcgtgcagtg | gtgcgaacct | ccacctccca |
| 53101 | ggttcaagtg | attctcctgc | ctcagcctcc | caagtagctg | ggactatagg | tgtgctgcca |
| 53161 | ccacatccag | ctaatttttg | tatttttagt | agagacaggg | ttcctctatg | ttggccaggc |
| 53221 | tggtcttgaa | ctcctgacct | catgtgatcc | tcccacctca | gcctcccaaa | gtgctaagat |
| 53281 | tacaggtgtg | agcagccacg | ccaggcctgg | tcacttcctt | tctgagtatc | tccaccgcta |
| 53341 | ctgagtgagg | accttgagca | gtgccaggat | ttgctgttgc | tcctgcctcc | caccctctct |
| 53401 | tgaatcctgc | tccctttccc | cctgcctggg | cctttgccac | ttccccagat | tttaattatg |
| 53461 | caaaattaaa | tagctgcttc | ataggcgaac | agctggatac | aacaccttgc | agtcttcagg |
| 53521 | ggaaatggtg | caagcataaa | aaacaggaag | agcaatttaa | gattaaaata | ctgctttgag |
| 53581 | gctggtgtgg | gcactgtctc | caacagaggc | tgacacttgc | ctgctggatt | taaacctgcc |
| 53641 | catggtcagg | catcaagccc | cccatgccag | gcctagggga | gacagaggag | gtgagatggc |
| 53701 | cacaccctca | gccacctttc | ctactacttt | tggcagctcc | acgattggca | ccagaatggc |
| 53761 | acttattgga | gggttttctc | cctcgcagcc | ctcctaagaa | tcgcctgctg | cctttcctcc |
| 53821 | tacccattct | aacccttcaa | acccagggga | tgctgggctt | ccgaccctct | tcccctttta |
| 53881 | taagtgtaag | gtgctatccc | tgggaggcca | atgctgttgg | ctgcacactt | atagaacccc |
| 53941 | aagttatttc | caggaccccc | taaaaatgtg | caatgctgaa | acaggactgt | tttactttga |
| 54001 | gcaccagatg | aattctggaa | cagtcaggtg | caaaactgaa | tcctggcatg | gcgaatcatc |
| 54061 | ttccccatgg | cttccatttt | aatttcagaa | gtgcattagt | ggaggctgag | aacttgcatc |
| 54121 | caacacaaca | tgaaatctaa | tgaggaattc | cgacattgcc | tgagagtgca | cacagcccat |
| 54181 | gtgcatttca | tttgcctgta | tgtgccctat | aaaaaattca | accactttgg | gaggccgaga |
| 54241 | tgggcggatc | acgaggtcaa | gagattgaga | ccatcctggc | taacagggtg | aaaccccgtc |
| 54301 | tctactaaaa | atacaaaaaa | ttagctggtc | gtggtggcag | gtgcctgtag | tcccagctac |
| 54361 | tcaggaggct | gaggcaggag | aagggcgtga | acctgggagg | tggagcctgc | agtgagccaa |
| 54421 | gatcgcgcca | ctgcactcca | gcctgggcga | ctgagcaaga | ctctgtctca | aagaaaaaaa |
| 54481 | aaaaaaaaat | tcaaccaaat | tcaaacgcac | catcttttat | aataaaaatc | tctctaatat |
| 54541 | ttaaaatRta | catcatactc | ccatttaaat | cacaatgctt | actattttta | cccaaagtgc |
| 54601 | ttctatttct | tgaaagagct | gatgtttact | agaattgaac | atgggtcatg | caagaagcac |
| 54661 | tgagtcaaga | ttggctggga | ctgcggaatc | ctctctctcc | tgcaggaatc | ccatccacac |
| 54721 | gctcctggtt | cactttcatc | atctgaagga | cctcttcgta | cctagattct | acttgttatg |
| 54781 | tgcagtttat | tttggttcta | aaggtcagag | gcaaatatta | ataaaggcat | ttgcagcctt |
| 54841 | ttaagcttgg | aagatattcc | tggcagggcg | aggggcaaga | catggcatYa | gaggtcattc |
| 54901 | accatccccg | gcactgtgtc | ccgccggcca | caggacccct | gcattcactc | ccttacctag |
| 54961 | tagtaggata | tatggaaatt | agcctgggaa | atgttgtatg | ttagcatagt | tcatgtttaa |
| 55021 | tatactaaag | catggccttt | agtccataag | gttttatgaa | ttacccgaac | atatacaagc |
| 55081 | attctttaaa | caaataacac | ttaaatacca | gagcgacaat | taaaactgac | caatggaaag |
| 55141 | gatctggaag | gccctggaac | aagtgccttt | tcttttttgt | tgtttttggg | tttgtttgtt |
| 55201 | tttgagggaa | acaggagagg | ctctgaaatc | caagtctacg | gtctcttaca | tgaaagtgca |
| 55261 | aaactccaaa | aagctctaaa | aaccaaaagt | tgttactcaa | attttgcaac | ccaccctgac |
| 55321 | atgcggatat | ctaaggtctt | cctgtcactc | cacttagagt | gaccattcct | atgttcMcta |
| 55381 | tccaaatgcc | catgcaattg | ggaagaaagg | aatcccaggc | tggagaagtc | tagaatatcc |
| 55441 | cattacagtc | ttgatactgt | attcattttc | tattgaaaga | aaaaaaaaat | ctcaattYtg |
| 55501 | aaaaacatcc | aaccacgcag | gttttgcaga | ctggtactat | tagagtctga | cataaacagg |
| 55561 | ggcctggcat | gtaattaagt | gagaaggtac | ccaagctaca | ttgaagaagg | acggtgactc |
| 55621 | gYagggttaa | aactgagagc | ctggctctga | tccaaagctg | tgtttaaaga | cgtgcaaaca |
| 55681 | taccacaccg | gttcaccgat | catcagccga | agctccaata | tcaattctgt | gttaaaccat |
| 55741 | caatctaaag | tggatatttt | tgttattttg | tttatctttt | ttcccccatc | aggacaccYa |
| 55801 | gtgaaccaat | ttcaaatgac | acctgaacct | acatattttt | cttaaactac | tgaactggaa |
| 55861 | caaaatcaaa | acatcaaaat | attctccaaa | agtggcggga | atggaatcgg | gatttcattt |
| 55921 | cggtttaagt | cccaggttga | aaagacacaa | gatggtcagg | tcatctcatg | gatggaaaga |
| 55981 | gcttaaacca | cccaYccatt | tttgaaacct | tgacctcgag | aagaaagaga | gaaagctttt |
| 56041 | aMgtttttaa | aacagctgga | aaatcatacc | atctgtgcat | ttttacccag | ccatactcca |
| 56101 | aacccagctc | tctattttat | atacctgttt | ttttcttgtg | attatctcac | tgttccttgc |
| 56161 | aagaatgagc | cgataatttg | atactccaga | gggaagttca | atttctcagc | tgaagatgaa |
| 56221 | gactcagggg | tggcctcctt | caggaattgt | aaagttcagg | ggagaacggc | aatccatttt |
| 56281 | tatatgctaa | tactttgtat | ttagttaatt | tgattaagtg | gtaggaaatg | ataccttgct |
| 56341 | cRtagatgga | tcgttcgcac | atttgcagta | aaacctaaat | gccaaatttt | cctccttcaa |
| 56401 | gttcttgaga | gagttatttt | catcactttc | atttcttcct | gtaccacagc | cattgctcat |
| 56461 | ctctttgttc | cctgaagagc | tttaaaagta | gctgtgttca | tgtcattttt | atcttgttac |
| 56521 | tttaatcatg | tgcttattga | caagagcgga | atttgtcatc | ctcttccaag | caagccctgt |
| 56581 | caccagtttt | tcagcgtgat | tcagcataag | tcatgctccc | ctgaggaagg | gacactaacc |
| 56641 | caacccaccc | aggaacacaa | ggacgtcact | ggagaggaac | ttttcccaaa | atccccagga |
| 56701 | cctgccttgg | tgcagggcaa | cttcaaagga | gagggtcttg | tgtgaccagg | aacagataac |
| 56761 | ctgaggaggc | atcatccttt | ccaggagcct | tcgccatgac | atggcagcac | tgttagaatg |
| 56821 | tcttgtttgt | ttctccagag | tctgttcctt | ttcttaggca | agtccagaat | atccaaagca |
| 56881 | gacagaactg | tttggatttc | tggatttgct | tttgtttgtg | ttttctctac | tttctattgc |
| 56941 | agtccaactg | agtcacattc | attttttaaa | caacttaaga | ttccatgtca | tttaaatagt |
| 57001 | gttatgttgt | ttgagaaagt | ccagtggcag | gtccggtgag | ttcagtgaag | aagcatgccc |
| 57061 | actgctggcc | tgtggcttcg | gtgaacgggt | gcattctttt | tttttttaag | acaaagtctt |
| 57121 | gctctggcac | cctggctgga | gtgcagtggc | actatcttgg | ctcactgcaa | cctctgcctc |
| 57181 | ccagttcaag | tgattctcca | gcctcagcct | cctgagtagc | tgggattaca | ggcatgcatc |
| 57241 | accacgccca | gctaattttt | ttatttttag | tagagacagg | gtttcaccat | cttggccagg |
| 57301 | ctggtctcga | actcttgacc | tcaggtgatc | cgcccgcctc | cacctcccaa | agtgctgaac |
| 57361 | gggcgcattc | ttaactgtgt | ttctccttcc | gacttgctga | aatatgagtg | atttataact |
| 57421 | cagcatccta | ttgactgacg | gatggcctgg | tttctgtgtg | ctgggtgctg | acagagcccc |
| 57481 | cagaagtgcg | taaaatgata | cttgctcacc | aggggttccc | attattttct | cctcaaccag |
| 57541 | aaacattccc | agagacatgc | cacacagtga | gaaataaaca | tggtgcaata | aaacacagac |
| 57601 | ggtaccgcga | ggatcctctg | tgaggagcaa | gaggtggaga | cagtcccagg | ggagtccaca |
| 57661 | gtgggtgggg | tcaaagtggg | tctgagtggt | gatgggagag | ctgggtctga | gaggtgccat |
| 57721 | ctggacaggt | ggaaagaagg | gtggaaggca | tttcaagcag | ggaaaaggag | gtaagggaag |
| 57781 | Yccagagaca | gtgggggaaa | ggctggttag | ggagtcaggg | aagaactcag | tgcagtcaag |
| 57841 | gaggaggatt | ttgaaggcag | ggctgagaag | tgcctgaggt | tggatgtgga | gttgggagtc |
| 57901 | ttgacctttc | ccacccaggc | cttgatgtat | cccagctgag | aagatgcaag | gtcagcaggc |
| 57961 | aggctagggt | ggcagatgga | caMaaaacca | gagaccaggg | accaaggagt | agatccctgc |
| 58021 | gacagcagga | ccaggacagg | caatgaaatt | tgagaaaaat | ttcaaaataa | ttgatgacta |
| 58081 | agagaaagca | gtctaaactc | caatattcag | tttttgcaca | cctatcttta | atgatctcct |
| 58141 | tacagttaga | aaacagtcca | ttttccccat | aatcggtagt | cgtttcatta | gcatctaaat |
| 58201 | tataattcct | taattataag | cctatcacct | attctgcttt | ccaaaaatta | atccagaagc |
| 58261 | tgtcaaatac | aaacttatgt | ttaataaaat | gaacatctgt | gatcacacac | caggagcaaa |
| 58321 | atcctaattg | ttctaaaccc | ggcactttgc | tttgacaacc | aagtaccttt | tttttaaata |
| 58381 | ctttatttct | ttaaaacacc | tgctttcttt | acatactgac | ttttaaagga | agagattaaa |
| 58441 | ttttattggc | aggaacagaa | gttagtctct | aaaatagcaa | aggaagaact | atgctttata |
| 58501 | gaaaagttgc | ctgctacatt | aaaaataaac | cagaatatga | atcaaaatcc | acaaatccaa |
| 58561 | caggggccaa | tccccaattt | tcccacaaag | agagccgaca | gtctgataac | ctcagctctt |
| 58621 | tggaattagg | ctgttggtgg | cggctgcagt | ccttgttccg | atggtagccg | caccacccca |
| 58681 | gcccaggatg | gctgtatttc | cattagaatt | ggctgtcctg | ccctctctgc | cttcgccacc |
| 58741 | ccccttcgcc | caagtccggt | tattcagtga | gttataattt | ggcactaaaa | ctcaattaag |
| 58801 | ctgaaacgtt | ggtcatacgt | ggtgtttttc | ccagcaaagc | ataatttctt | tgacccattt |
| 58861 | tccaaatgtc | agtagatcga | ttttaaagca | cagagaggta | aaagtYtgtt | taaaaatcca |
| 58921 | gctcgcattt | ctagaaactg | gctggaattt | ttttttttta | atttcaaata | aacagtcagg |
| 58981 | atgtggtgtt | actatattaa | agcgcttcaa | gttttcatag | cgctcgtcaa | acagagacct |
| 59041 | cggaacgctc | tgcagacatt | aattaatgtt | cgctccggcc | ctggaagcca | tttcaccaat |
| 59101 | ggaaattccg | atgagaaagg | aagaaacgag | gggttcaagg | ccgcgccgtt | gtgagtccgc |
| 59161 | tgcggaacta | ggaactgaaa | ccccgtggtt | cccaatgagc | cagcgaaagt | ctgtcgaagt |
| 59221 | attgagcacc | cctattgaag | actgtgggag | ttttggYggc | ttaatgggat | tgtgttcggt |
| 59281 | ccttcaggct | ctcctttaaa | agattccatg | gcaccaacga | gactccaata | aaagggcctc |
| 59341 | tctaattgct | ttctgacttt | ctatgaaact | ttctaagcta | tgctgacatc | ctcgaataca |
| 59401 | actatggaat | taaagaggag | agaaaggcga | ggcacagtgg | gtgcgcaaag | aaaaagaggt |
| 59461 | tctcagcgga | gcgtgtgtga | ggcggggggt | tacgggggag | gggagacggg | gcgggtgtga |
| 59521 | agtctgtgcc | gggaaaagaa | aaatatgagt | gttctctttt | gtgtgcgcac | aaacagccga |
| 59581 | gcgcggggag | gtcgggcccg | gggtcacgcg | gctccgggct | gcagctgccg | ccgtggggcg |
| 59641 | gggggtccca | ggcggccacc | gggcgtcgcg | gccgcctgcg | gcatcagcat | tccggcggcg |
| 59701 | cgggcggccg | ctgtcctcgc | gcgaccccag | cccgtccaga | gcgcgccccg | gcaccgaccc |
| 59761 | tcggggcgag | gcgagcgcag | cccccgctgg | ccaacaaggt | aagcgcggcg | cggggagcgg |
| 59821 | tggccgggag | cctgggcgcc | aggcgacccc | tcgacagggc | gcacggaccg | gttctccgcc |
| 59881 | gcgcgggtcg | atgaccgacg | gggaggcccg | agtctggccc | cgacgccctg | gcccggtgtc |
| 59941 | cccgacgcgc | ctggagcccg | ggagggaggc | gcgggcctgg | cctgggccca | ggaggatgga |
| 60001 | gcccgactca | gggccgtctc | tccccgcttg | ggggtgctca | ggagggccca | gggtacctgc |
| 60061 | gcgggcacct | tggcggcggg | tcaccctccc | tccgagccac | tccgtccgtg | ggcagcggcc |
| 60121 | ttaccaggtc | cgagccggac | gctcagcgtt | gccctccgcg | agcccccagc | ctcccctcga |
| 60181 | gcgccgcggg | agccccaggt | gcacacacgc | aggcctgggc | cgggcctcca | ggcctctgtc |
| 60241 | cttcgggcgg | gctgggaggt | ggcctggcga | tgcccgccga | ggggtggaga | gggcgaagcc |
| 60301 | agggcggcgt | cggcgaggcc | atcaaaggcc | gggggtggcg | gcccgccgcg | ttgcccatga |
| 60361 | ccaggccgag | ggcatgaaag | gatctttatc | ctccagtgac | attgccaggc | cggcgctttt |
| 60421 | ctgcggcctc | cccctcccgc | ggccctaatt | ggggccggct | gctaatgtga | ttaaaggcca |
| 60481 | gttaaacgtt | tctccgagca | gggggtggga | agaggccgag | acccctgccc | cctccccagg |
| 60541 | gtcacgccag | gcccgtggtc | gggggtcggc | gacggtgcca | gcctgggacg | gcctggccag |
| 60601 | gtgcctgccg | attgttcacc | cccaggcggg | cgggccggcg | ggctcccggg | gctttatgta |
| 60661 | agccggtggg | ctttgggccc | gaccggattt | agggattctt | ttcgcacagt | ttccattttc |
| 60721 | tggcctttgg | aactgcgccc | taagccctcg | gggccctccc | cctccggtgc | ccggcgctgg |
| 60781 | cggggcccag | ccacgggggc | gggctggggg | tgccaggctt | tgggggtctg | gagggcctga |
| 60841 | agcaggtcgc | gttgggggtc | tcactaccta | agacagtgac | tcaggacagt | gggacctggg |
| 60901 | tgctgtgctg | cggccaggca | gagccKgcga | cccgcggcgc | cccccgcggc | ctcggcgaca |
| 60961 | gcccggttcc | cacgtcggcg | acggcgtggg | tggtcccgcc | cgcccgggag | ggctccgagt |
| 61021 | cttggccgcc | cggggcgcgg | ggcctgagag | cgagtgtctg | cgccgcgctg | cccgccgcgc |
| 61081 | cagtttccga | ggtcgcccgc | gggctcatgc | cctgcgccct | ggggccccgg | ggaccttctc |
| 61141 | caagccggcc | tgacctggtg | gaggctgtgc | gctgcgctcg | gggaaggccg | ggctggtgcc |
| 61201 | gggggcagcg | ggtcccagct | ctgaagtgcc | agcgccggcg | ccccactccc | cgcctgctac |
| 61261 | ggtgctctcg | cccggaaagg | cccgaggccc | tggaaggagc | cccgcggggg | ggcgccgtct |
| 61321 | ggagcagccc | tcaggggcgc | cgggctgccg | cgacgcagtg | gctgtaattg | cttcggggta |
| 61381 | cctggggatc | gatggcgtgg | cccagccggg | tgtctgcgcc | tctgaggttg | caaatctgga |
| 61441 | accagttagg | atgcgggagg | cRgataataa | aaagccaaat | gggcgccagg | tggaggagtg |
| 61501 | agctccgcac | gttccatcag | gtggcccggg | ccgcgcgctc | gggcggcggc | agagtctctg |
| 61561 | gggcactcgg | ggcgggcggc | agcaggtggg | acccgcggcc | cgacccgcgc | tagggccgcc |
| 61621 | caccccctcg | gaccccggcc | gggtctctcc | acagcctccg | tgcgcgtccc | agaaggaaaa |
| 61681 | tgctagcaaa | ccggaaggcc | gcacggggcc | gagccggcct | cagcccggcc | aggagaggcc |
| 61741 | gtcggtgccc | cgaggaggaa | ggggacccgg | cccgggacgg | ccgccccgcg | gtacccagga |
| 61801 | aggacgcccg | ccgttcccag | caccccagcg | tctgaaaaat | gaatgtgaac | tccgcaagcg |
| 61861 | tgctcccgcg | gacattttac | atgtcggttg | ttcacatttt | aaaaatattc | tctgaaatag |
| 61921 | tctgcagaac | tttttcacat | ctaacaaatg | tcagattgaa | cagatcagaa | gataagaaat |
| 61981 | gaacatgaca | ttttaattca | agtagagaga | aagcagacgg | tatttttaaa | ataatatttt |
| 62041 | tgtaaaaacg | tattgtggat | ctaagatttt | gtcatgttca | aaatgtataa | ttttttgata |
| 62101 | tttaaaatac | acattttgta | cattttcaac | caaaaagaca | gggaaaaatt | taaaaagcaa |
| 62161 | aagctggaaa | ccaagaaaag | cctggagaga | aaatgggccg | taaggaacca | gagcccgtct |
| 62221 | ttctccacac | catttttttt | Nccttcctaa | tagccagaaa | gaaaaagaaa | aagaaaaaaa |
| 62281 | aaagtgaaaa | taaaataatt | tcatattaaa | ctaacacaga | gaactaatta | atttctttcc |
| 62341 | agatgggttg | aagggacctg | gctgttttag | tgtgctcaga | aaatgctaga | ctcaagttgg |
| 62401 | ttttctttcc | ttctgctgct | cagagaatct | tacgaaaaag | taaacaaccc | cagcctaacc |
| 62461 | atttttttat | cggcttattg | aacacagata | aaattagaat | ccttttttat | ttgagataaa |
| 62521 | agacacacag | gaaaagacta | Nttttttttt | taaccaaggg | aatatctggg | gtttttttgt |
| 62581 | atgaaactgt | aacatttaac | taacatgtaa | tgagctgaac | gaccttgggt | ttgtttcact |
| 62641 | ctagctcctc | ctgaaatctt | ccattttttt | ctgagatggc | ttttccagtg | atcttgtgtc |
| 62701 | agtaagagag | gaatatacag | tgcagcaaat | aatttgtgca | ttcgtggtca | atacatttct |
| 62761 | cagtcaaaaa | atcaaaaaca | ggtcaatggc | tggttattag | gaataacctt | tgaaccgaac |
| 62821 | aggaaatggg | gaaaatacct | gtttgttgac | gcttgcacgc | ccaggaggag | aattgaggtg |
| 62881 | cagttagttt | cactgtgtga | gggagagatg | ccgctctgtc | cagagggttt | attggaatgc |
| 62941 | caggccccag | gtgtttgggt | gtgtctatgc | agacagttag | tgctgacccc | tgaggatttt |
| 63001 | gatgtgtata | atcatgccat | aagaggaagg | caggtgggtc | aattgtcagt | gggagcacag |
| 63061 | gagatgctgg | ggcatgccgg | agcctgggca | gtttctatcc | tgataccttc | cgtgtccatg |
| 63121 | ttttagtccc | atattgagga | catgaaaggt | ccattttatg | tttctctcct | ttaaaaactc |
| 63181 | cccagtggcc | tactcggcag | cattgctggg | gacccactgg | tcatttttca | taaaaataag |
| 63241 | accacagtgt | ggaccaaaac | ttgggatctg | agatgtcctt | gagctcacct | gtcacatcga |
| 63301 | gtcaccacct | ggagaagaaa | gatttgctga | cctcctacag | agccaggcaa | taggacgttc |
| 63361 | agcctcagtc | ctgattacgg | gtgggcagtt | gggtttatgt | gtgtgtgttt | gggttttttg |
| 63421 | ttgctgtttt | tgttttgttc | tgtttttctg | ggaaaacaaa | ggtccctttg | ggggtacctg |
| 63481 | ggctggccgg | tacggcaaac | aggaaagcca | gccaggtcag | gaggagacgt | ggcttcacgt |
| 63541 | tggaatgcca | gtttgctttg | tgattgttta | ttacaactga | aggttttgtg | tcatctagcR |
| 63601 | ttgcccaaag | tagaagccca | ttcccaggat | ggatgaatct | gtggtaagag | ataaacacaa |
| 63661 | gaaacaaatg | cccaggggag | gaggagaagc | agattgcctg | gggcaggtaa | gagggctaca |
| 63721 | cctggaaatg | catctgctgg | ggttctcacc | cacaccagaa | tctctggtca | gagcagctct |
| 63781 | ctttgaagaa | tgccagacaa | acagaaacct | ggccacaccc | ccaccagagt | tacctgattg |
| 63841 | aaacacgaat | ctgatcactg | aaagccttcc | tgcatccgtc | tgctgcacgc | aggaggcagc |
| 63901 | tcggcctcct | tccccagtgg | cctcccagcc | ctacctctag | aatttcctgg | cccctgccct |
| 63961 | cctgccaccc | tgatatcYct | taStccctaa | gacacttgYc | cttgtcgccg | acacgggccc |
| 64021 | agcggtgaga | gaggcgctct | cNgcccattg | cccgtgaaca | cactgcgttc | agggcttctc |
| 64081 | agagcaggcc | agcctggtgg | agctgctttg | gggcctagct | ctgggggtct | caggagtacc |
| 64141 | ccagcctgca | gataaggaac | cctatgcaat | gtataaggaa | aggaaagcat | ggcccatgtg |
| 64201 | agcacagcat | tagggccttg | gaactccgtg | tttagcaccc | cccatgctgc | agccaaacat |
| 64261 | tgacacccca | agttcYagga | ccccatgaga | tggtgccttg | cctagccagc | tgcgttgatg |
| 64321 | tgtgggaagg | ggcatgttgc | ggaaatcctc | cagcaggtcc | tggctcctgt | cctgtgccca |
| 64381 | gcactggcgt | tcttgttcag | agaacaaagg | cccggaggcc | cctgcagaac | caagaaagcc |
| 64441 | tgaaagccgt | ggctttcaaa | gcttgctgac | cgtggctggg | gtaagaaata | cattgtgcat |
| 64501 | ctcagcccac | ggcaagccag | acaactatgt | ataaaataat | taattaacta | tacctagata |
| 64561 | accaaaacac | aatttttgca | aaagaatggt | tctcttacta | gacgtcatga | atgctgatct |
| 64621 | ctgttcatcc | tatttctttt | ttccaaataa | tggctgccac | ccctgaaaca | atcccatgat |
| 64681 | cctaatgggc | tgcagcgtgg | agcttgcaga | ccacccttta | gagctgaggt | tgtgtgggtt |
| 64741 | aagcctgagt | ggagggagac | ccgcagttcc | ttcctgctgc | atctcctgcc | cccacttcca |
| 64801 | gccctggagt | cagaacctcc | tgctggaatc | ctagccacca | cttcctacta | tgacattgag |
| 64861 | aggccacctc | ccctcctgag | ctggagcctc | tgcttcttcc | tcttagaatg | aggaggacaa |
| 64921 | ctccctgcta | gggtcttaga | gaggattcag | cgagatcatg | taccagatga | ggtcttgact |
| 64981 | caatgtgtct | gcccaggcta | gcacctgaca | gtcatctgtc | acttttgatc | ctgtgcctcc |
| 65041 | ctggggccca | agatgtcttc | tcccctaccc | cccagtagcc | ctccagtaaa | atcctcctcc |
| 65101 | ccccttccaa | ttccactcca | gtcttctcct | tgggccagct | cctcctcaag | ccccactgca |
| 65161 | gattttggga | ctcacagatc | tgtgcagcgc | ggattaaggc | ctgccaccct | ggtggactct |
| 65221 | caggcctggg | ctctgcctgg | ctcgccggca | tttatagaca | catgtctgat | tgccagttag |
| 65281 | ccccgatcca | acctcaacag | cactgtggac | acagaggctg | tgcttcttcc | catttgcaga |
| 65341 | taaagtatat | ggggcccagg | aggtatcatc | atgtgaccgt | gagtcgcaca | gttagtggca |
| 65401 | gagctggggt | aggctagctc | tcctggcctt | caaagaccat | catgctcatg | gcccagagtc |
| 65461 | cttcctcctg | gcagggcact | agggcccttt | ctgacaggct | cgcagcaacc | agatttgttc |
| 65521 | cctggctgcc | cacctccacg | tcctccaccc | tgggagagct | gagttcgttt | tcctttgact |
| 65581 | gtttttttaa | tgcttccctc | aggaggcagg | ccacagtctt | cctgcaccac | cctcacgggc |
| 65641 | tctcactgct | ggagcaatga | ttactcacag | atttacccaa | ggagagtgtg | tacttggaat |
| 65701 | ggctgtccgt | gtgttccctg | tgcacacaca | cacgcatacc | cgcacataca | ctgtggtgac |
| 65761 | ctgacacaca | cacttccgtg | atctcacaca | ctcgtgcaca | cacacacact | gccctgatct |
| 65821 | cacacaaaca | cacaaacact | gccctgatgt | cacacacaca | cactaccctg | atctcacaca |
| 65881 | ctcatgcaca | cacacacaca | ctgccctgat | ctcatacaca | cacacacaca | ctctgcccta |
| 65941 | atctcacaca | aacactgccc | tttgccctga | tctctctctc | tcacatactg | tcctgatctc |
| 66001 | acacactcat | gcacacaaac | acacactgcc | ctaacctcac | acacagacac | acacacactg |
| 66061 | ccctgatatc | atacacacac | acacagacac | acacatactg | ccctgatatc | acactcatgc |
| 66121 | acacacactg | ccctgatctc | acacactcat | gcacacagac | acactgccct | gatgtcacac |
| 66181 | acacacacac | acgcacactg | ccctgatctc | acacatacac | atacacactg | ccctgatctc |
| 66241 | tctcacacac | ccactgccct | gatgtcacac | acacacacac | acacacacac | taccctgatc |
| 66301 | tcacacaRtc | atgcacacat | acacacactt | ccctgaccct | atcactctgc | acattggagc |
| 66361 | taagctcatg | aaggctgctc | atgcatttta | tttggcaagt | ctctctcaca | tctttaatca |
| 66421 | cactagcctg | cccactgcca | atcaataaag | attaggaaat | cgattgctaa | cttactcttg |
| 66481 | ggttagataa | taaaattgtt | tgaaacatgc | acctggagga | atttatctgt | gaagagtcct |
| 66541 | ttcagagttt | gtttcaagct | ttgcaagtct | ctcatggctc | tgaggtcggg | gaggctgtga |
| 66601 | gggatcctcc | acgcccagca | gacgtggaag | gagccgacgt | tcttacggga | gatggacaga |
| 66661 | cggtcagcat | gtgaatagtc | ccctgcatgc | aggtgaggac | tggggcagtg | cagagccgca |
| 66721 | gcagggatgg | gctatgcctg | ggagccgcca | gctctggatc | aggtggccag | ggacggtcat |
| 66781 | gctgaagagg | aaggctccag | tgaagctctg | gaagaatgtt | ctggtgcctg | tatgtacaaa |
| 66841 | ggccccccta | attcaggacc | tggccctgta | cagatgagga | gcaggaagga | gccagtgtaa |
| 66901 | ctgaggccag | tgtggctgca | gcaaggggct | ggaggcgtga | gaagaaacag | aaaagaacgg |
| 66961 | agggccattt | ctgcctcccc | agtccggatc | atcctcctcc | tccaccccag | agccccaggg |
| 67021 | tgctgagcct | tgcgcccctg | cccctcaagg | ctatggaatg | tcattgccac | tcagcgtgaa |
| 67081 | ggttctggag | gggacctcaa | acaccaggcc | cctctgccca | gagagcccca | gtggacccgc |
| 67141 | tgagccaggg | acctgctcct | tggagccaac | caccttgtga | cttgtgaatt | gtgttgagtc |
| 67201 | ccgtttcctt | tttccctttt | gtttattgct | ttgtgtatct | ggcagcttta | tcccaaagct |
| 67261 | gctctcacgt | ggtccctctg | tcccatcctg | ccattttcct | ccctctgggg | ccccttgcat |
| 67321 | gggagactgg | gagcagcgtc | cacccgccac | ccagcagagg | ctcaggtcct | ggagttaaaa |
| 67381 | gagaagcaca | ggcaggggaY | gctctccaaa | ctgccttcag | cccgcatctt | tgaactctgc |
| 67441 | agtaggaaga | ctcctgggcc | cccatgtccc | catgcatatg | cacctgcatg | catgtgacac |
| 67501 | acttctcggc | ccatggagaa | gactgtccgc | acgggggtgt | gagctgccca | gcacccactg |
| 67561 | atcaattgct | gcattcccag | ctgcctttaa | gctggcatgg | ggcgccctct | gaggcacgcc |
| 67621 | cagcccctgg | ggcctagact | ctggtgttct | ctaggaactg | tctatctctg | tgtgtgggag |
| 67681 | ccacagactt | gggctttcag | acccccacaa | tggatggctc | aggcctatgg | ctcaccccca |
| 67741 | gcatctgtga | ccaccaccac | tgcccacctt | ctttgcctaa | gcattacttc | tggggggcag |
| 67801 | ttcttcactt | atgtgtgcaa | gccagccttc | tagaaaactc | tttgctctca | tgaccaggca |
| 67861 | ggccttgcac | agtccagatg | gtgaagccca | gttcctacct | tccagtgagg | agcacctgac |
| 67921 | ccttcagggg | cgatagacgg | ggccctgcac | agatgggaca | ggacaggtgg | ggtgcacaga |
| 67981 | ggatggcagg | tgccctctga | gaggcagggt | cggggcaggt | cgggcaggag | cctggcatct |
| 68041 | gtggctgact | gtttggcccc | tcaaggcctg | ttttgctcac | agttttgctt | cctccttgct |
| 68101 | ctctgttttc | cctgccacct | gaacttggtt | gcatgctgct | ttctgtccat | tgccctcagc |
| 68161 | ctctcacctc | agtcatgacc | cttaagccag | cacctccccc | atgcgtctta | ctctgaggtt |
| 68221 | tcccaggagc | atgagcctcc | tccagtgtca | ttgcggctgc | tttgatctcc | ttaatggttt |
| 68281 | tgcttgagtg | tggattcata | ttcagactct | tttagggaca | caaagacccc | caaagtggat |
| 68341 | gaatgcccta | tggaggcaga | tgcccagttg | ggggcccgag | gtctggctgg | cctgtcctcc |
| 68401 | ctgcccaggg | tttgctgaac | accccagcca | catgctccag | gcacacaccg | aagcttcagc |
| 68461 | tcaagattca | cctcggagga | gggcatctag | tccaagccac | ttcgtctaag | aggcgaccaa |
| 68521 | ggtggccagg | acttacttgc | catgagacct | tggcaagtgg | acaagtgctg | agagtggtgg |
| 68581 | gaggtgacag | gcttctctac | cagcactggc | aagcacttaa | tccaagcccc | gaggctccag |
| 68641 | ctgcaaactg | ggacgggaat | ctgatgacac | ccaccctaga | gggatggggg | taaatgtaga |
| 68701 | cgacataatt | tccatatgtc | tgcattgagc | gttcacatac | atgagcgtcc | tcagaagcat |
| 68761 | tatctcctca | tgcttctcca | aggaatgtgc | ccttttctta | accctggttg | actgagtcct |
| 68821 | accgaggaag | gaagggtttc | aggccacacc | ccagggatag | cgctggatgc | ccccagccag |
| 68881 | gccaaggtgg | tcagatttcc | ttgcaagagt | ttgagcaaag | acacagagat | tgaattagac |
| 68941 | tgagctgggc | ctggaggctt | gaggtcctgt | cgacgaggag | agcgatatct | cagtgtatga |
| 69001 | atctgtgggt | tttctgtgtg | cccttgcagt | cctggggacc | ctcatggccc | ttggtgagcc |
| 69061 | cacattgaag | gagaagaacc | aagaggcggc | agagaatcta | gattcaggct | gcagaaagtc |
| 69121 | ttgctactgc | agaggtgaga | cgaggccagg | gcaggaaggg | agcaggggtg | gggtgcagga |
| 69181 | ccctgagtcc | cctagaggcc | acggtaggac | atcagcagca | ccagggggag | tcaccaaagc |
| 69241 | taagtgccaa | gatgYggtcg | acYgaggacc | tgctcctggt | gcccgcccct | tcagcccaga |
| 69301 | gacggtgtgt | ggtccgtctc | cacccagcac | aaccgtccta | aatacctgaa | tgagtttcct |
| 69361 | tgagctcctg | cagcagagac | ccataaaatg | cttaaaggag | cagaaatcta | ctcccttgct |
| 69421 | gatctggagc | ccagaagtct | aaagtcaagg | tgtcgacagt | gtcgtgctcc | ctctgaaggt |
| 69481 | tcctgggggt | gcccttcctc | acctcctcag | ctcctggtgg | ccctggacat | ccgatggctt |
| 69541 | gcggctgcat | catccactct | ctgcctttgt | ctttccgtgg | ctgccctccc | tctgcatctg |
| 69601 | tctctgtgtc | cactcctctt | tttataagat | cgccagtcct | tgggtctagg | ccttgggtct |
| 69661 | agggcccacc | ctaatgcagc | gtgacttcat | cttaactaat | tacatctgca | aagaccctgt |
| 69721 | ctccaaataa | ggtcatattt | tgagcttctg | agtggaagtg | gatttggggg | acagtcatca |
| 69781 | acccagcaca | atgcccctcc | tccccatgct | ctctaaagag | agaaggatct | tggacatctt |
| 69841 | gattggacac | gatgacacga | agacaaaagt | ttctgactag | ctaggccaag | ggtggacaca |
| 69901 | ttgtccctgg | agtgacaagt | cgggccagtg | atcttgtagg | gacaagccta | catccagagc |
| 69961 | agtgctggta | taggggcaag | ccaacatccg | tggcagtgct | ggtatagggg | caagccaaca |
| 70021 | tccatggcag | tgctggtata | ggggcaagcc | aacatccggg | gaaaaccaaa | ggcctgtagg |
| 70081 | aaaagcctat | ggggaggatg | gagagaagag | ggatggagcc | ctggatgtaa | cggggacctg |
| 70141 | catcctgtat | ccctgtccct | atgatgctgt | gatggtgcct | gactttctgt | agaccaaagc |
| 70201 | tctccttttt | tttttttttt | ttgagacaga | gttttgctct | tgttgcccat | gctggagtac |
| 70261 | aatggtgtga | tctcagctca | ctgcaacctc | cgcctccggg | tacaagcaat | tcccctgtct |
| 70321 | cagcctccca | agtagctcag | ataacagtca | tgcaccacca | ctcctggcta | atttttttgt |
| 70381 | atttaataga | gacggagttt | caccatgtta | atcaggctgg | tcaagaactt | ttgacctcaa |
| 70441 | gtgatccaca | tgccttggcc | tcccaaagtg | ctgggattac | aggtgtgtgc | caacacaccg |
| 70501 | ggccccaaag | ccctcctttt | actggagcta | ttttgcacgg | gatcaatagg | cttctgcagt |
| 70561 | ggtgctggcc | atcctagcat | ccctggcttt | ccttccctgc | tgtggtctat | atagtttggg |
| 70621 | tggagctgaa | cccatagagt | tgccggctgc | acatgggacc | agtgccctcc | ctttggacgc |
| 70681 | tgcaatcagc | ttgggagttt | actcacagct | gaatttgagc | aacatgagga | ggggagattc |
| 70741 | ataaactggt | agaatgaacc | atagagctga | cagtcacctg | gccactttga | ggagaaggcc |
| 70801 | tgctggagaa | cgaagacctg | gaggaagctg | aactcagaca | gatggacaga | cagacttggt |
| 70861 | gacgtcattg | gaggcaccag | gtccagctga | accttgaact | ctgtcatcac | aggaaccagt |
| 70921 | aaattcacct | ttaagcccaa | gttgagtttc | tgtcactcac | ccccYaaaaa | agtgctgatg |
| 70981 | ggagggtgtc | tgggtaacaa | ctgcatgcca | gttgaccaca | tccatgccgc | tgccagcccc |
| 71041 | ggatctgggg | tagagtctag | ccgcctgagg | gcatcaagtt | tgtggcccat | gagggtcgta |
| 71101 | gccatgctac | agggcagagg | acaagaaccg | ggtccccatg | agaccaaaag | gagacaatag |
| 71161 | gtggaaagga | tggcctgcac | tgaagccggg | gccaccaggc | ttgtcgcccc | tcactctgtg |
| 71221 | gacagactgg | gttgcaccat | ttctgaggga | atctccatga | ctcagtcctg | ggcattgcgg |
| 71281 | ctggggccag | tactcaaaat | ggcagcagac | gcagtcggcc | tgccagcccc | tgctagctct |
| 71341 | tgtttcaggt | cagaggaaga | aagtactggt | ggcctctggg | gatccagaaa | ggactggtgg |
| 71401 | cctccaggtg | tccaagagtc | ttctcttcaa | cgaacatggt | gagggggagc | attgtgctgg |
| 71461 | gttgatgagt | gtcccccaaa | ccaacttcca | ctcagaagcc | caaaatatga | ccttgtttgg |
| 71521 | agacagggtc | tttgcacacR | taactagtta | agatgaagcc | atgctgcatt | aggccagggc |
| 71581 | cctgtgtcca | gggccttccc | tgtgaggtgg | ccgccaggag | gccgacctca | gggacacaag |
| 71641 | gactggaatg | tgggggtctt | tggagaggca | tgacgccccc | tctgtgagtg | gacagacatc |
| 71701 | aagaatgaag | ggagccctca | acggggatgg | agcagcccct | gagacctgag | ggtcccaccc |
| 71761 | tgggacaaag | gtgccctgag | ctcaagccag | gacacccagc | agctgccggc | caggctgtgc |
| 71821 | ttcccccaca | gcctctccac | accctcgctg | tgtcttctgt | aagatgaggt | cccctccatt |
| 71881 | accctgggcc | agggatctca | aaacggaagg | ccgccaacca | gtcagcggcc | aggggctgga |
| 71941 | gcccatggtt | tcccatggct | cccactagga | cacttgccag | agagggggtg | ggtgagctgg |
| 72001 | ttcccatgga | gacaggctca | ggatccccag | aggccaccag | tcctttcttc | gtctgacctg |
| 72061 | aagcaagagc | aaggccaggg | gcttacaggc | tgaccgtgtc | tgcctccgtc | tcaagggctt |
| 72121 | agactgagtg | agactggcag | aggccctcca | ggtcactccc | attgtttcac | agatgaggaa |
| 72181 | accgaggcct | accgggaggg | agggccttcc | gacaagtcac | ggaactgatc | gggggagagc |
| 72241 | tggatgcctg | ctacaccgtg | gctctgctgt | ctcccgtgga | aacccgggcc | tctgttcgag |
| 72301 | cctgaagtgg | cctctctgca | ccaggctgct | gggagacctg | cagtcaccaa | tggcaacgtc |
| 72361 | actcttgcaa | cagccagtgg | ggtgtggggc | agcagacgaa | gctcgagtac | cgcctgggtt |
| 72421 | ccaagacaga | atgagacaaa | gtgaggggtc | atatgggtgc | ctggcctccc | aggcagatgt |
| 72481 | ttctgttacc | aggtggtctt | tgaattctgt | cctggactaa | atatagttcc | ttgggcattt |
| 72541 | ttgatcttgg | taatcatgca | accatggtac | agaaataatt | ggtccgctct | catcttttcc |
| 72601 | agattacagt | tcggggcagc | tgagtaggcc | ctgggtagag | ggcacagagg | tatggctcgg |
| 72661 | gtgcaggcgg | gaccctgggt | gacacccacg | cagggtagag | cccctccccc | ggcctcggtc |
| 72721 | tccccacctg | tgtaacgagg | aagtggactg | gacatgactc | acggttcttc | catgtccagc |
| 72781 | attctgcttt | cagcatcacg | ggaacgagag | gtgatttccg | taagcaggct | ccaaggtgcc |
| 72841 | accaccaagc | ccagaagtat | ctttcccact | ttgcagattt | cctacagacc | cagtattctc |
| 72901 | tcttccatgg | gttgagtttc | taaaatcaca | tgactgtatt | tttcttttaa | tacagaaaag |
| 72961 | cataataaag | gcataaaagc | ccatgcccct | ctgcagagca | ccctgttgac | attttctgaa |
| 73021 | agtaagtcat | ctatgcacct | gggaagaaag | cacagaggac | tcagaaaggc | caaaaacaaa |
| 73081 | aacaaaaaag | ccccacctca | gcccctgccc | ctctcccgga | gaagccggag | ttgtcagccc |
| 73141 | atgcagcaga | gttggtcagg | agctcaagtt | cacatccccc | aaccgccaca | tactacctgt |
| 73201 | atcacctggg | caggttctcc | caatacctca | gtgtcttcat | ctgcaacgtg | ggtaagatgg |
| 73261 | gaatgcccac | ctcctgggga | actcaggact | cgctgagtta | actgcattca | gggacctgaa |
| 73321 | agagactcgc | caggcagtaa | ccccagtcca | cttgttccat | gctggtgtga | gcagtgactg |
| 73381 | catattcttc | caaaagcatc | taccccatct | attttttttt | tttttttttg | agacagggtc |
| 73441 | tccctctgtc | acccaggctg | gagtgcagtg | gcatgatctc | agctcactgc | aacctccacc |
| 73501 | tcccgggttc | aagcgattct | cccgcctcag | cctcctgagt | agctgggatt | acaggcgtgc |
| 73561 | accaccatgc | ccagctaatt | tttgtatttt | tagtaaagac | agggtttcac | catattgctc |
| 73621 | aggctggtct | ggaactccca | acctcaggtg | atctgcccac | ctcagcctcc | caaggtgctg |
| 73681 | ggattacagg | cgtgagccac | cgcgctgcct | atactatcta | tttgttaagc | cccaaatgga |
| 73741 | tcatactttg | gttcagcctc | ttgcgttctt | tgccttgttt | attttagaga | cctgtctatc |
| 73801 | tcaatccatg | cagataaatg | ccttgctctt | tcttaggtgc | caccaagcat | agacacagac |
| 73861 | ctccccaatg | ccccatcttt | cgccattaat | caacagtgtt | gggatggtag | gacaccagga |
| 73921 | gttagacacc | tcaaagcacc | ggttctggcc | acactggtta | tgcatattgt | actcgactga |
| 73981 | ttcacactct | catggccctg | gatgagtgtc | tctggccatc | ccgcaggctg | ggtgcttccc |
| 74041 | agtctgagcg | tggtggcctg | ttcttctcat | ggctattacc | ccgggcctct | gtgggtccac |
| 74101 | cagccagagt | tctgatgccc | ggcgcgctca | caggagcctg | acttggggac | agctttatga |
| 74161 | ggcagtgcag | ggaccttgag | gccatagtgg | tgcagcagag | aggtggggat | gaggaggggc |
| 74221 | cgccagggcc | cagggcagct | cctggactca | ctgggagagc | cgaagtccac | aggcagctcc |
| 74281 | tcacgccttg | tcaggcctgc | cctgcactca | gctcccagat | tttatagaag | gaagtccctg |
| 74341 | cctttaggcc | cagtcaaaaa | aaattggact | gggatattaa | caaccaactt | tccctggtgc |
| 74401 | tttcctgagt | caacctctgc | agccggggct | ggctcagatg | cctgccttgg | ggccctctgg |
| 74461 | ggcagcgtgt | ggagtcaggg | ccatctgtga | tctcctcagc | aggttccatc | ctgaccctgg |
| 74521 | agagccagct | gacttgtgga | aacagcagga | tgccattctg | agccaagccc | agtgggtagg |
| 74581 | tacacagggc | caacccaggt | cacccatcaa | gtgaccacag | agcaatgaca | cccatctgcc |
| 74641 | ccatactgtc | actcgcttag | agaaagttcc | agaagagggg | ctccaagcat | gtgtcccRtg |
| 74701 | ataaagaggc | ggcctctgcg | agggttaatt | tcagtgtcaa | cttggYgggg | ccacagcgcc |
| 74761 | cagatatttg | accagacatc | actctgggtg | tttctgtgag | gggcttgggg | atgagactca |
| 74821 | cattggaatc | agtgggccag | gtaaagcagt | ttcccctccc | taatatgggt | gggcctcatc |
| 74881 | caatcagttg | acagcctgaa | taggacaaag | ggggtcccgt | cccctgagta | agatagaatt |
| 74941 | cctcttgcct | gccagccttt | gagctgaatg | tctagctttt | tcctgccttt | ggacttgaac |
| 75001 | tgaaacgtcc | gctctgtcta | agctcgggct | gctgtagact | gtgtggctta | agcatcaaat |
| 75061 | attcatttcc | caccattcag | gaggctggaa | gtccagcacc | acggtgctgc | caatttgatt |
| 75121 | ttggtgaggg | cccacttact | gctggccttc | ctctctctac | gtcctaatgt | gacagagatc |
| 75181 | agagagagag | agctgccctg | tctcttctta | taagggcact | Ratttcgttc | attagcgctc |
| 75241 | caccctcctg | acctaatcac | cttcaaaaca | ccccacctcc | taagaccatc | acattggagg |
| 75301 | ttggggtcca | ccatatgaat | tttgggggga | catgtctagt | ccctagtagc | ctcttctggg |
| 75361 | tctccagctt | gctgactgaa | aatcttggga | cttatcaatt | cagttattcc | aggagccagt |
| 75421 | tctttacaat | aaatccctgt | ttgtgtgtgt | gtgtgtgtgc | gtgtgtatgt | gtgtgtgtgt |
| 75481 | gcatgtgtat | gtgtgtgcat | gtgtgtacat | tctgttggtt | ctgtttctct | ggagaacctt |
| 75541 | gactaataac | attctccaag | gtgacaagga | gactgacagg | gggagagtga | agtttaacac |
| 75601 | atcggttaaa | atagtcacaa | gattctcatc | aactgccaca | aatggcatct | ggccacagcc |
| 75661 | actgagcttg | gccacttctc | cggctttgca | aacgccgctg | gatgcgcccg | gcctgctgtc |
| 75721 | ccacagtccc | accctgcctt | ctcctacgtg | tcctttctga | actgccttcc | aagctcctcc |
| 75781 | caaccccgta | gggtccacct | cattgtgcct | cctttgtctc | ctcctccgca | gctcccctcc |
| 75841 | caacactggg | ttcctagctc | ctagaggtca | gaggtcacac | ttttccctct | ctctgtctcg |
| 75901 | gtaggtgaaa | gcagtaagtg | gcacctaacg | ggaagtgatg | gggttggtgg | ggaagagaac |
| 75961 | aaagtgtgga | tcagtcctga | ggaggctgtg | caaagaccca | gtgctgggtc | caaggcccaa |
| 76021 | ccccaagaac | caggatcttg | tgcctcagtt | tcctaactgt | aaaaggggat | gttggaatca |
| 76081 | cgtgtgtcaa | agatcccttc | caattctgtt | ctttgtgggt | tttctcatgt | ctagagctgg |
| 76141 | aagagggcaa | gcagagaacg | cccccgcctc | caggccccga | gcactgtgag | ctgtctgcct |
| 76201 | gcacagggct | gcctgacccc | accctcctga | ccacgtcccc | actcctgggg | acggttcccg |
| 76261 | gcctccacgg | catcccgggg | aaggcaacag | agatggactg | gagggcacgg | gaggacacgc |
| 76321 | attcactgac | cgtccagccc | agcaaagcaa | gaaaccgtca | aaaactaaaa | attccatttg |
| 76381 | taaacaagat | cgaattattt | gattgtgaaa | ccagggtcca | tggaatttaa | aataatttaa |
| 76441 | tatgaaacaa | tatcatttga | aatgctggcc | agccaaggac | ctggacgggg | agggggactc |
| 76501 | tgtcctcctg | tgcccagcca | cgtggaaacc | cagcctcaga | gaataataac | aaatcattct |
| 76561 | acagcaagtg | tggctgagat | tcagctacgt | ggcagcccca | ggccaggccc | ggggggcagc |
| 76621 | cggcgaagac | tcctcgtcct | ctcagagttt | acggtctaac | tgagcagacc | agggttggac |
| 76681 | aattaaataa | cgatgccaga | aagcaggaga | ggagtgagtg | ggtggcactc | aagccaaaag |
| 76741 | ggaggcctga | tagagccaag | gggagtgtgc | tgtgggccat | ggcactgcca | gaggaggctc |
| 76801 | ttgggtgctc | tggcaccgca | gtgagcagct | gggggcttgg | taagtaggga | aagccagcac |
| 76861 | tcagaggaga | aggtggcaga | aaaagaaata | ttcagaatag | gaagcgtgat | catttgcaac |
| 76921 | cccagctttg | tcttgtactg | cccatgccaa | cttgggcaag | cacgttatcc | caagcctcag |
| 76981 | tcttctcatc | tacagaatgg | gaacaatccc | agtccctact | tcctggctgt | tgtgagggtc |
| 77041 | ggaaatcatt | cacgtgcagc | cctctgggag | cccgtgtccc | tgacagacag | tggtgctcca |
| 77101 | ggtggagcac | gaggcaccgc | tggcgctgta | agcagatgcc | tgtggaggga | ggggaggagc |
| 77161 | aggtttccta | gaggcctggg | aggggctgat | gcctctgcag | tgggctctgc | actcagctgc |
| 77221 | cttgaaatcc | cagcaacagt | gcctgcctgg | agtgacggga | gcaggctctt | tggggaccgg |
| 77281 | ggggtcagga | gggcacatgc | acgtgccttg | cagctggtgc | ctcttggaag | gatggggagg |
| 77341 | cggggacccg | gcagaccctg | gtgcaccgac | actccacagc | catgtcttct | gcctcaacat |
| 77401 | aaacacgatt | gggaatagtt | caggactgta | agagcaagaa | aaacaaaccc | agggaaacca |
| 77461 | aagagcgcgc | aaatgctaac | tttcatgtca | catccagaaa | ccacatgttc | atcaagccac |
| 77521 | ctgcgggctt | gtaactcagt | ggggagacac | agggttgttg | tccttagaaa | aatcaagcta |
| 77581 | tccttacagc | tgcaagggga | aaagtccagt | tgctgcctcc | cctccatcat | cctggaccag |
| 77641 | gtccccccac | agaacagccc | tttgaggcag | ccagggagct | tcccgtcgct | gtggccacct |
| 77701 | ggggcatggc | ccctaaacct | ttccgtgcac | agggggttgg | ggaaaagccc | cggacctcca |
| 77761 | ggctgatgag | tggcaggccc | agaaccccca | tcagggtgcc | cagctcccca | gtctccctgt |
| 77821 | ctcaccacca | ccccaacctg | ggctcagccg | cccccgttca | gggcaggcag | gacttgtcct |
| 77881 | ggcctcgggg | aggggccggg | gaagaggaga | gaagacccca | gtggggcccc | ccaggcccgc |
| 77941 | acatgccgcc | cgactacctg | tgggcttggg | gagggctcca | gatcactcct | gccctcagag |
| 78001 | acggcgatgc | tgagaagtgt | tatttttatt | cctccccaag | ccttgccaga | ttacattgtc |
| 78061 | aaggccagca | ctttggagat | atttccttgg | tttcgcaatt | cacacagtga | ctaacacatg |
| 78121 | ttacattttg | aaaacttctc | tgggtaaaaa | tttaagctga | attgtaaata | cataaaagtc |
| 78181 | tcaacgttaa | tggggtacat | gatatctcag | tgactattgt | gtaacaccaa | gattcggaaa |
| 78241 | ggatgtggaa | ttccatatag | tcgggtgagg | atgccgtccc | agagccgccc | tgtgaaagca |
| 78301 | tcattgtgag | cagcaacctt | gcctttctct | gcggttatgt | aagttacaaa | accctttgcc |
| 78361 | tcttggcctc | gtgaggcatc | aggaccctca | ggaggctgga | actgcagagc | tccgcccgcg |
| 78421 | atgatgaatc | ccctccaggg | ggcatgtgca | cacgtgcccg | gcacaccctg | ccaggggctt |
| 78481 | catgcttgtg | acctccttgg | caccatgagg | cactgggcta | caggtgacaa | aactgaggca |
| 78541 | catgcatgtt | aagggacttg | cctaaggaca | tcccctgaca | gaggcaagca | ggactcaatc |
| 78601 | ccagatggaa | tgctcactgc | tatgcccatc | accccctcag | cccctggtgc | tgggcagcta |
| 78661 | tgagccatgc | tgtgccgtgt | catgcacact | gcaccccccc | cccaatgatg | gcacaggatg |
| 78721 | gcccccacca | ggacaggcga | tgcatgggcg | gtcacctggg | gtcactgtca | gagcatctgg |
| 78781 | actacgaaat | gaaggggatg | ggccacttgg | cagtgtccct | acgcaagcca | gagctacagg |
| 78841 | agcacctggg | cataggtgtg | ggaaggaggc | agggagagaa | ggaaggaagc | agagaagcca |
| 78901 | agagtggttg | gggagtggct | gtgttgggag | ccagtccccc | cactgcccag | gctcctgccc |
| 78961 | agccgagtgc | ccagagccct | gcccatctgc | agcagccctg | cccagccctc | ccgagcctcc |
| 79021 | acctgcctgt | tcattgcttt | gctggatgac | gcttatcagc | ctctacttgg | ccagttttct |
| 79081 | gtttcatttc | cccgttcaac | attgatctcc | acacaggact | gtagactcca | tgcaggcagc |
| 79141 | acactgtctg | ccgggctcct | ggccgcatca | ccagagcctg | gccccaggac | tgggcatggt |
| 79201 | gggcattgag | tagttatttg | ttgaatgtat | gcacctccga | aagaaagagg | gagccaccat |
| 79261 | cctcgcctcg | ctgctgtggc | tcactgagtg | gctttaccac | ctaagatgcc | tgctgccttt |
| 79321 | ctcctgctcc | ttctgtgacc | tcagacaggc | agtgcagggg | aggggtaggc | agggcagctc |
| 79381 | tctcctcagc | agagctcacc | ttgggccact | caggggccag | gaagtggcag | tgcaactcga |
| 79441 | gacgtttatg | acacaatcaa | ctccctgctg | aatattgatt | tttcttcaaa | gctcagggcc |
| 79501 | tatctgtctg | ggctcctccc | agcgccaccc | ccagccctgc | ctggcgagcc | tggagactcc |
| 79561 | agcagcaagg | cttcatgctc | ccagacgctg | caggtccccc | tactccgccc | tggtcagggc |
| 79621 | cctccccacc | gacatcctgg | taacttagac | attgcaagcc | acagctgccg | cagtgtgcca |
| 79681 | gaaaacgtcc | ctccaaagac | acaggattta | tgaaggactg | ttctctgctg | tgtcaggaag |
| 79741 | ggtattcaca | caggttggga | agcatctcat | gtgctccttt | attgactgtg | ctgggaaata |
| 79801 | ctgaagtggg | caaatgccgt | ccatctgagc | tctcaggaca | cgtaggggat | aaaggggagt |
| 79861 | tgaggctgac | caggaggcta | tcacaggtca | gtgtgataag | cacaaaaata | aaagtatgcc |
| 79921 | cagggcacca | ggacggcagg | atccgctcga | agtggggtcg | acagaggctt | cccaaagaaa |
| 79981 | ggaagtttcc | accatctctt | gcgattttca | tttggcatct | ccagaatgcc | tgttctatta |
| 80044 | gaaccaacta | aggccttaat | gggattactc | agctttcagt | cataacaagt | ttgtctaggt |
| 80101 | catgtaggga | ggtactttaa | agtcattctt | ccttctcttt | tattatagca | atgacttaca |
| 80161 | atgcttgaaa | aaacattttc | cttaattcaa | ttaccaagtg | agctaaatgc | atttgctgga |
| 80221 | gataattaag | aatctttaca | aatataaaac | aattatccca | tcaaaataca | gtgctggatg |
| 80281 | ctattattca | cgctgggttt | tcaatcagag | ccccctctcc | ccttttaaag | caattccaaa |
| 80341 | gccccctgtg | cctgcctttg | ctggccgtcc | ctgtgagccc | aggccatttg | tcctgccagc |
| 80401 | tctccagcac | catggaaggg | cgccctgtct | gcccgacccc | tggcccggag | ccaccagagc |
| 80461 | tctcttcgct | cacctctctg | gtcctagtct | tggcccagag | caggtatcaa | aaacaacgtg |
| 80521 | acacagacca | gaggagccgg | gggagacgtg | acaactaaat | gcaatgaagt | cccctggcgt |
| 80581 | gggtcctgga | acagagacag | gacattaatg | ggaaaactag | cgaaatccaa | ataaagtctg |
| 80641 | gaattgagtt | aacaatggcc | caatgtcagc | ttctgagtgc | tggcaaatgt | accacggtaa |
| 80701 | tgtgcgcggt | tcacaaaggg | aagaccgggt | ggggggcgaa | cgggaactct | ctgtactatc |
| 80761 | gtaacttttc | tataaatcta | aaattgttcc | aaaataaaag | tttataaaaa | caaagcaaaa |
| 80821 | caacaaatgg | gactgagtgg | gcaaaagaga | aggcagaatg | tctccattgc | tgaagtgagt |
| 80881 | attcctggtc | ttcagaaacc | cgcctggccc | ccacacccac | cccccacctc | cagttgcagt |
| 80941 | cccgtctcag | ttccctctga | agacaagtct | cagggaccag | ctgcctgcgg | ttgctgcctc |
| 81001 | cacttcaaca | ctatctctcc | ccacgctatt | tgtcctgagc | cacaaagtga | aggtgaggtg |
| 81061 | tcaaagtgag | cacctgcagg | acggcaccct | ggatgtttag | cctaagaaag | ctcccccgtc |
| 81121 | ctccttagag | aagcccccac | attgcacacc | aaggagtgag | gctgaggcag | tgctgctgtc |
| 81181 | agtattctcc | aaggccgcta | actggacctc | tggacaacct | gctcttcaca | gggccccctc |
| 81241 | agtccctcct | gtcctggcca | caggccacag | cctccctcag | acaggctgga | atgaaggaac |
| 81301 | acactgagcc | tggtctgcaa | accctggcgg | gggcttgtac | tggacagcag | tgctgatatg |
| 81361 | gggtgggctg | agtatagcag | aggcataact | tccatccccc | aggtctgggt | acagacacag |
| 81421 | gcatgacttc | catcccccag | ggctgtgaaa | aggagacgct | gtccaaggca | cctcatctga |
| 81481 | cggtgcttgc | gatgaccgtg | caggacatca | gaggggccag | aagcacccac | ggccctgcgg |
| 81541 | tcggtcgtat | ttacctcatc | attgccatgc | ctttgaggag | ctttcctggg | ccttctgagt |
| 81601 | gcctgagctt | gggaagtaac | cagtggctct | atgagatttc | ccccagaggg | cactacgatt |
| 81661 | ttcatgggcc | tctcccacca | taaaaatacc | tgtatttaaa | aacgtgttta | aggaatacaa |
| 81721 | atccttctac | cataaagata | ggcatgtgtc | cttgcggcac | tattcacaat | agcaaagaca |
| 81781 | tggaatcaac | cttgatgcac | ctcagtggtg | gactggataa | agaaaatgtg | gtacctatat |
| 81841 | accatggaat | acgatgcagc | cataaaacag | aacatcagac | atcaggtcct | ttgcagcagc |
| 81901 | acggatggag | ctggagggat | ggagctggag | gccgtcatcc | tacgcgaatt | aacgcaggca |
| 81961 | cagaaaatca | aatactgcat | gttctcactt | ataaatgtga | cctaaacact | gagcacacat |
| 82021 | ggatacaaag | gaggaaacag | ggaacactgg | gacatactct | agggtggagg | gaggggagag |
| 82081 | gctgaggatg | gaaaaactac | ctttcaggta | ttattcggat | gacctgggtg | acaaaattat |
| 82141 | ctgtacacca | aaccccatga | catgcaattt | acccatgtaa | caaacctgca | catgtacctt |
| 82201 | tgaacctaaa | ataaaagctg | gggggaaaat | tgtagtaaat | gtccctaagt | atgaaataaa |
| 82261 | taaataaaat | ttaaaaataa | aaaaattaat | aaatcttcaa | atgcttccac | atattttttt |
| 82321 | ctggtttaag | caaagttaga | gagatgttct | tgggccccta | aaggtatcag | gttgagacag |
| 82381 | acatcctcgc | cctgggcctg | cggagcttaa | tggacaggcc | gggtccccgg | gccacactta |
| 82441 | ccagttaagt | gacctggggc | aagttactta | accaccccat | cttcaatccc | tcatctgcaa |
| 82501 | aacagggata | atgatacctg | ctctgcagag | cttttatgag | gattgcttaa | gctaattggt |
| 82561 | gtaaaagcat | taattccagc | ctggccccca | ggaggcgatc | aataaagaag | cattactctt |
| 82621 | gtgaaatact | ctagccatca | gagcaggcaa | caatgtttct | gtcttctaaa | acgttcccaa |
| 82681 | gagagcctcg | gctttactct | acaaataaga | cctcttgatt | ttattctgcg | agcttaaata |
| 82741 | tctttgactc | tctcattacc | tgaaactcaa | ggtccttaaa | taggtctgag | gcccctaaac |
| 82801 | gttcctctaa | gtgccctgta | gagccatcac | ttagtggctg | agacacactc | gctggctttc |
| 82861 | ccatcgacag | atgcctcggt | ggccctttct | ggatcatcta | atccctgctc | caggccactg |
| 82921 | gctcaagttc | cctcattgta | ataagtgcaa | gggagggtgt | ttatgaagga | aagcgggttt |
| 82981 | gactgaagtc | caggctgaac | tcggaatttc | cctgtttgct | ttctcttcct | ccccgggcgt |
| 83041 | gctgatggac | cagacctgcg | ggagctaact | caacaggcct | ccagctgcca | gagatttgag |
| 83101 | atgttagtca | gggctcaggg | gcggggggct | ccgggagcag | ggagcaggga | gctggagccc |
| 83161 | tgaaaagacc | tcagcgtctc | cttgtcagga | ctgaacttcc | accttgggtc | ctcgctgagt |
| 83221 | cttattttgc | taatgagatc | agacaggctt | gtaattttag | gtaactgcaa | ttgctaagac |
| 83281 | tggaagagag | actcattctc | tggcattccc | acaaattctt | cccagtttgt | ttagcttagg |
| 83341 | aaattaggca | agagcaggta | gaaaaacggc | aggtcaaaca | caagccattg | caagaaactg |
| 83401 | actcatgctt | taccaacagc | gttattcatc | ccccccgttc | ctctccctgg | ctatgtattt |
| 83461 | attcgtttat | tcagcaaaca | ttgattgagc | acctaacatg | tgtctctgcc | ttttcacacc |
| 83521 | ctcaggccct | tgcccaggct | gcatcctccg | ccatgtcctc | ccgttgaccc | actgtgtatc |
| 83581 | cttctagacc | aggtcaaagg | ctacctcctc | tgggaagcct | gccccaaagt | tccatgccag |
| 83641 | acccaatccc | tgcctctctg | taggaaggag | actaccatgg | ctcccaagag | gagcactggc |
| 83701 | tgccgagtca | gaagaggttg | gctgagaagc | acggctccag | gacatccctg | atgtgtggct |
| 83761 | tgggcaaggt | actgaggctt | tctgctttct | ttcctcttct | ataaagtgtg | aatactaata |
| 83821 | cctcccaaaa | ctaagtgccc | agggtgctac | ataaaataca | ctacacatca | ctttccacgt |
| 83881 | ggaactgagc | ttacaagaaa | ggcaaggagt | ttcccagagg | ccaaaggcag | gggaaagcca |
| 83941 | agagcgagag | tgataagtcg | gtgctggcat | gaagccacct | caggtgtcag | gcagtcccag |
| 84001 | tggctttcag | tggccatcca | ggggcagaga | gaaggtggga | tggcaggatt | gccatccttg |
| 84061 | caccaaacca | gaacctcaga | ggttctaacg | ccagtggagg | ggcaacttga | gaaaaccacc |
| 84121 | tgctgcatgt | ggaggcttct | actgcttacc | catattaaat | gctcttcttc | ctccaggcga |
| 84181 | cagatgaaca | cagtctctga | ccccagcaat | tagcctgggc | ttgggactag | ctctggccaa |
| 84241 | agggctctga | gaggaagcga | tgtgaatcgc | tcctagacta | aagccattga | caccaccaga |
| 84301 | ctcggcagcg | ccatctctct | cctgtggcac | gtgtggaggc | tgagcctgaa | aatggtaacc |
| 84361 | tggacccagg | ctgctccagg | gaagacattt | ccctggagag | ttactcaagt | ccccagcaaa |
| 84421 | ctttgcagga | gccataaaag | caagaaataa | agcatctgtt | gggtttagcc | agtgagagag |
| 84481 | ttcctttgtt | gctgcagcag | aacttaggct | atcctgacta | attcagctag | taaaagaagc |
| 84541 | agcaggagca | cttgtctgtc | tctctctggg | atccaggtgg | aggacaagtc | tcccctgaca |
| 84601 | atcacagcca | cagacctcac | ttcacaggag | ggtggggttc | gaattcatac | tccctttgtg |
| 84661 | ttcaaggaaa | ctccaaacca | taaaattaaa | gatatttcag | gtatgtagtg | ttccgtgact |
| 84721 | agaagcaaac | tcagatcccc | caacctgacc | tcacaggatt | cccacaaata | aagactcacc |
| 84781 | agaacaggca | gtcgaaatcc | caaattcaaa | ccccaagaac | ttcaaacaaa | aattactcac |
| 84841 | tagggaattt | ttaaaaataa | ttttaatgca | taaagaaatg | aattgagagc | caaaactatg |
| 84901 | ggcaattagc | aaagtactat | caaaagtgac | taaataaatt | tgaaagagaa | ccaaacagaa |
| 84961 | ctatgaaaat | cttattaacg | atatgaaaac | ctatttggta | aaactgcaga | ttcgaactgg |
| 85021 | ctcaacacag | aattagtgaa | atgaaaggta | gaattgaagc | aattacccag | agaatcacag |
| 85081 | agagaaacgc | tgctggagaa | aaaaaaaaaa | aagaggtgaa | gaggcatcga | ggcagagtga |
| 85141 | gtagcgtgat | agctaattaa | cgttctggaa | gaggacagta | gaaataacag | ggctgggggt |
| 85201 | gcatgcctaa | agctataatg | gctaagaatg | ctccaagatt | gacagtagat | gtgaatcttt |
| 85261 | agattcaaga | atactagtga | gtttatagca | ggataaataa | aaatatgcct | tgagatatca |
| 85321 | tagtagaact | gcaggatacc | aaagacaaaa | ggaaagcata | tgcttattat | aaattcatca |
| 85381 | gatttattaa | tttgtaagag | aaaaatgtat | caagcacctg | ctaggtgcca | ggcagtgttg |
| 85441 | tagacacttg | ggatatatcc | gtccagaaag | agacagaatt | tgtgttcatt | gtcaccagga |
| 85501 | agacaggtga | caaaaaataa | acataataaa | taagtaaatt | atacagtgtg | ttagatattg |
| 85561 | gcaaatgcta | tcaattggaa | tatatggaaa | aagaaacaaa | aaaggatgag | gagactctga |
| 85621 | gtatgtgtgt | ggttgggaga | ggctgagcca | gggcaccata | tttaataaaa | tgtcagggga |
| 85681 | gttaacaaag | ggaagagata | acctacagga | taggagaaaa | tatttgcaaa | ctctccatcc |
| 85741 | aacagggggt | taataagcag | aatgtataaa | gaacgcaata | gcaaataata | acaatctgtt |
| 85801 | tttaaaatgg | acaatagacc | tgaatagaca | tttctcaaag | gaagacatac | aaatggccaa |
| 85861 | cagggatttg | aaaaaatggt | caacatcact | aatcatcagg | gaaatgcaaa | tcaaaaccac |
| 85921 | aatgagacag | catctcaccc | cagttaaaaa | tggatattag | caaaaagaca | aaaagtaatg |
| 85981 | gatactggtg | aggatgtgga | gaagaacact | gttggtggga | atgtaaagta | atacagtaat |
| 86041 | tagggaaaac | agtatggagg | ttcctcaaaa | acctacaact | agaactatca | catgatctag |
| 86101 | aaatcccact | gctgggtatg | tatcctaaag | aaaggaaatc | aatatgtcaa | agtggtatcc |
| 86161 | gcactcccat | ctttattaca | gcactattca | taatagccaa | gatgtgggat | caacctgagt |
| 86221 | ccatcaacag | atgaatggat | aaagaaaatg | tggtatatgt | atgcaatgga | atattattca |
| 86281 | gccataaaaa | ggatgaaatc | ttgtcatttg | cggcaacgtg | ggtggaactg | gaagtcatta |
| 86341 | tgctaaatga | aataagccag | gcacagaaag | ataaatatgg | catcacatgt | tctcagtcgt |
| 86401 | atgtgagagc | taaaaaaagt | ggatttcatg | gggagtggaa | tggtggttac | tagagctagg |
| 86461 | aagggcagga | gggagggaga | gaagttggct | aatgggtaca | aaaatacagt | tagatggaag |
| 86521 | gagtaagttc | tagtattcaa | tagtatagta | cagagactat | agctaacaat | aagttattgt |
| 86581 | acatttcaag | atagctaaaa | aagaagaact | ggaatgttcc | caacacaaag | aaaagataaa |
| 86641 | tatttgaggt | gatagatatt | ccaattactc | tgatttgatc | attacacatt | gtatacagat |
| 86701 | atccaaatat | cacaggtact | cccaaagtac | acacagctac | tacatatcaa | tttttaatat |
| 86761 | tacacctgaa | aacaatttca | agagaggctt | cattgagaag | gtaaaatttg | ggaggggaat |
| 86821 | tgaaggagag | gaaggagttg | gtgagaccga | gatatggaag | agtgtctctc | aggaagagaa |
| 86881 | gcagctaggg | catcctggca | atttgtgtat | cttcatttac | aaagtgtctg | tccaaacctt |
| 86941 | ttgtccaact | ctttaattgt | tgcatatatt | atattattga | gttgtaagaa | tttcaaatat |
| 87001 | attctggata | taactctgta | tcagatatat | gtattgcaaa | tattttctcc | ctgtctgtaa |
| 87061 | cttgtctttt | cgttttctta | acaggtcttt | tcaaatgtag | acattgttta | ttttgatcat |
| 87121 | gtccattttt | atctattttt | agttttatgc | ttgtgggatt | gttgtgttct | gttaagaaat |
| 87181 | atttgtcttc | ctcaatgtaa | caaagtgtct | agaagtttta | cggttttggc | tttgtttagg |
| 87241 | gctgtggtcc | atcttaagtt | aatttttctg | cattgtgtga | ggtagggttg | aagtttatat |
| 87301 | ctttatggat | gaatagctaa | ttattccagc | aacatttgtt | taaaagtctt | cccttttccc |
| 87361 | aataatttag | cttggccctt | ctttcaaaag | tcaattgaaa | aaatatatat | catataaaga |
| 87421 | cttattatac | tatatgtatt | tttccagact | ctttattctg | ttccattgag | ctgttcttac |
| 87481 | actaccacac | taccttaatt | attatagctt | tatcatgagt | tttaaaattg | aatactgtaa |
| 87541 | gttcccctca | ctttttttaa | attgctttgg | ctattctatg | cccactgcat | ttctatataa |
| 87601 | attttacaat | cagcttgtcc | atttctacaa | aaaagacaga | tgtgatttta | gttgagatta |
| 87661 | agttgaatct | atggatcact | gagggctgaa | tagacattta | acaatattga | ggcttcagat |
| 87721 | tcatgaactt | ggtatatctc | ttcgcttatt | tatgccttct | ttcatttccc | tcagcgatgt |
| 87781 | tttgtagttt | ttagtgtaca | ggtcttgcac | atatttgtga | gatttatctc | taggcatttc |
| 87841 | atacctttta | tgctattgta | aggggtattg | tttttaaata | tctttttatt | tggaggtaac |
| 87901 | gttaaaatat | cgaaagagtc | acatccacag | tacagagact | ccctgtatat | tattcaccca |
| 87961 | gcttgccctc | gtgctaacat | tctacataat | cacaatctaa | tcatgaaaac | taagaaatta |
| 88021 | atattggtac | aatactatta | actcaactac | agactttatc | tggattctac | tagttttcca |
| 88081 | ctcatgttat | ttttcacttc | caggatccca | tccaggatcc | tacattgtat | ttagttggca |
| 88141 | tatcccctta | gtcttctaca | atctatgaca | gttcttcagt | attcctctct | ttcatgactt |
| 88201 | gaagatgctt | tcatggcttg | atggtctgtc | agatattttg | tagagtgtct | ctcagttggg |
| 88261 | tttggtttga | tattttctca | cgactattca | tggtcacgct | ttatcaagaa | tactactgga |
| 88321 | gttttgtacc | cttctaagtg | catcaaacta | ggcagttacc | ttatttatta | ctggtgatgt |
| 88381 | gagccttggt | aacttggtaa | agagagtatc | tgtcctattc | cttcactgta | cagttactat |
| 88441 | ttttcttttt | gtaattagta | actcttggga | aagatacttt | gagactgtgc | aaatgtcctg |
| 88501 | tttgttaaac | ttttgcccac | taattttagt | atttggtgtt | taacttgcct | ccagcaatta |
| 88561 | ttgctgtgga | atttcaatga | tttttctatt | ttcctcattt | cttctacatt | tgttaatagg |
| 88621 | aattcttctt | taatgaggtg | ttgttccttt | tctcccattt | atttattgat | acttataatt |
| 88681 | taatattata | tattgcacat | tatttttata | atgtaaaata | taaaaattat | atatttatta |
| 88741 | tgtatatgtg | tgtgtgtata | tatgtaaaat | aacctgagga | aaagatttta | ttattttggt |
| 88801 | tataatccaa | tattattact | atttattttg | ttgctcaaat | tgttccagct | ttggccattg |
| 88861 | ggagctcttt | caaattggtt | cctgtgtcct | ttcagtaccc | atgatccttt | tggtttttga |
| 88921 | gtatatggtt | tatcatatgg | tattattttt | tatttcaatc | accaactgtt | ctttgttagt |
| 88981 | atatagacat | gcaatttatt | tatgcatatt | taaaatgagt | ttcttacaga | caacaggaaa |
| 89041 | gtgaaccttg | tttttttatc | cagtgtcaca | atctctgcct | tttattggag | agtttagact |
| 89101 | tttacgttta | atacaattaa | tcagtatcat | tggatttaag | tttaccatct | agctatttgt |
| 89161 | tttttattta | tcctatctgc | tctctgttcc | tttttctctt | ttttccttgc | ttctttaagt |
| 89221 | ttaattgagt | atgtttttag | gattttattt | cttcactagt | atctaacaaa | ctatctcttt |
| 89281 | gttctaattt | ttagtgtttg | ctccattatt | taaaatatac | atatttaatt | tatcacaatc |
| 89341 | taccttcaat | tgatattata | ttatcacttc | atgtatgatg | tcatattcct | gctacagtat |
| 89401 | atttcaatct | taccccaccc | atccttcatg | tttttgttgt | catagatatt | actttttaat |
| 89461 | atatcgtaag | cccaaagtac | atggttgaca | ttctgtttaa | aacagtcaat | tgtcttttaa |
| 89521 | agacattaaa | aagcgagaaa | aaagtctttt | aatagatatt | tttaaatgca | tgtagcacaa |
| 89581 | taatgtaaac | agttcatgta | aaacaccaat | ttataatatt | ctatatatat | atatatatat |
| 89641 | atatatatat | atatatatat | atatatatat | atatatatat | atagtttcct | tcaggtaata |
| 89701 | ggttggaagg | gtttagaata | aaatgaacat | gcatcacatc | tgttatttta | aaatatttaa |
| 89761 | tcaagttttt | aaaatgttta | tgaaccacca | gaatgccact | gccacaaata | tcattaccaa |
| 89821 | taaccagtct | tttttttttt | tttttttttg | tgagacagga | tctcactctg | tcacccaggc |
| 89881 | tggagtacag | tggcatgatc | atggctcatt | gcagccttga | ctttcgcaga | ctcagatgat |
| 89941 | actcccacct | caacctccta | agtatctggg | actacaggca | ggcacaccac | catgctctgc |
| 90001 | tattttttac | tttattttat | tttatgtatt | tttgtagaga | tggggttttg | ccatgttgcc |
| 90061 | caggctagtc | tggaacttcc | gggttcaagc | aatctgccca | gctcagcctc | ccaaagcgtt |
| 90121 | aggataacag | gtgtgaacca | ccacactgcc | tacaaataac | cattctttaa | gtgggctttt |
| 90181 | atttgtttaa | aaaacttttt | tgtgtttatc | tacataattg | ccattctcac | agtcttcatt |
| 90241 | ccttttcaga | gagccgggtt | tctatctggt | attgttttct | ttatgcttga | agaacgttct |
| 90301 | ttaacatttc | tggtagtaca | agtctgatga | cgtcttaaaa | tgtttatttt | gccttcattt |
| 90361 | ttaaaagata | ttttcgtagg | atacagagtt | ctagattaac | agcttctttc | ttgcacttct |
| 90421 | tttgagatgt | taccccattg | acttctggct | tacattgttt | ccaaaaagaa | tactgttttc |
| 90481 | attttcacca | tgttcctgtg | tatgttacac | gtctcatttt | tctctggctg | cttctaggat |
| 90541 | tttctcctta | acgccggttt | cagaaaactg | cttatgatgt | ggcttgctgt | ggttttcttt |
| 90601 | gtatttatcc | tgcttggtct | tcattgcact | tcttggattt | atagatttat | ggttttcttc |
| 90661 | aaatttggaa | atttttcatc | cattatatct | taaaacattt | tttgtcctct | ccttgctttc |
| 90721 | gaagacttca | atttttccat | accttagatg | acttactatt | gccccatagt | cactgcgaat |
| 90781 | ctgtttattg | ttttccagtc | tcttttctct | gtgtgctgtg | tctcagatca | cttatagaac |
| 90841 | tatgtcttca | agttcactag | tctttgaacc | agctgtcaag | cttatccagt | gaaatttgca |
| 90901 | ttttagacat | agctctacca | gttccacata | gtttcttttt | atatcttcca | tttattttct |
| 90961 | cactatggtt | atcttttcat | ttaagtactt | gaacatagtt | ataataattg | tttttaacat |
| 91021 | tgttgcccgg | catttccgtt | gttcgtatca | tcctttggtc | tgtttctatt | gacggcctta |
| 91081 | ttccctggct | gtggttcaca | ttttctggct | ttttggcaca | tggattttga | tcagatgctg |
| 91141 | aatgttgtga | atgtttcatt | gttgagtgtc | tgtaatttgc | catcctcttt | taaggagctt |
| 91201 | tggggtttgt | cctgcttggc | agtttagtta | cttccagttc | agttacacac | tttctaggct |
| 91261 | cgtttttagc | tttataggac | aggtctagWg | gatcctttgt | tctagagata | gtttgggccc |
| 91321 | actgctaaag | tgtggctctt | ctaaggtgtc | taccgaatgc | ccggtgatca | gcaagaagga |
| 91381 | attctgaact | gcaattgcaa | ttgagaactt | gaacgatccc | atctccacat | ggactttatg |
| 91441 | aacgaacagt | tcaacgcagc | tccagtgaat | tactctttga | ctgacctggt | gagttttacc |
| 91501 | tgactcaggc | tttttttttt | tttttttttg | gtattcagca | aagattaaag | aggacccctt |
| 91561 | tgctcctatt | ctgtagctct | tttttgcaaa | gatctttcct | ttttgtaagt | atgacccccg |
| 91621 | gcttttggtg | acccccctgg | agaagcctca | gtgctctgct | tagcttccca | cccccacccc |
| 91681 | gagtcccaca | cagcagcatg | gaaacctcca | agcagaaagt | caggcaaaga | aagggctcct |
| 91741 | tcctatctcc | cgcttatctc | ctcctgggag | cgcagttgtt | tgtctctctt | gcccaRtgta |
| 91801 | aagaggaagg | tcagtgcagc | ccctgttgct | ccatcatcat | ggttgggagc | agacatctgt |
| 91861 | cccaccacat | ggttttgagc | tgacaattga | aaagaaactg | acaattgaaa | agaaacactc |
| 91921 | tggcttctga | actgagaaca | gacaatagga | gtgcaagggc | agaagcaagg | agacttccta |
| 91981 | gggggctatc | gcatcacagc | catccagaaa | atgaatggtt | gggttcaaaa | tgaatggtaa |
| 92041 | cattttgaat | gcaaagctta | cagaaatccc | tgatagattg | gatgtaagga | aacaagacac |
| 92101 | tttgggaggc | cgaggcgggc | ggatcacgag | gtcaggagat | cgagaccatc | ctggctaaca |
| 92161 | tggtgaaacc | ctatctccac | taaaaacaca | aaaaattagc | caggcgtggt | gggggacgct |
| 92221 | tgtagtccaa | gctactcagg | aggctgaggc | aggagaatgg | catgaacccg | ggaggcggag |
| 92281 | cttgcagtga | ggcgagatcg | taccactgca | ctccagcctg | ggtgacagag | cgagactcca |
| 92341 | taaaaaaaaa | aaagaaagaa | agaaagaaag | agagagagag | agagagagag | agagagaaag |
| 92401 | aaagaaagaa | agaaagaaag | aaagaaagaa | agaaagaaag | aaagaaagaa | agaaagaaaa |
| 92461 | gaaagaaaga | aagaaggaag | gaaggaaagg | agaaaggaag | gaaggaagga | aggagaaaag |
| 92521 | aagaaaaaag | tcaagatgat | acaaggtttg | ggtctgagca | actagaataa | tctcgttgcc |
| 92581 | atccattgag | atgctgcagt | ctgtgggtgg | aacacgtctg | gggctattgg | ggaattgttt |
| 92641 | ggaggcatga | gcttaaatgt | ctacgaggca | cacacacgtg | gaaatgtcaa | gctgggactt |
| 92701 | taaatataca | attcctgagc | ttgtgcagag | tttagggttg | gagatataaa | tttggggtga |
| 92761 | gtgtaggata | aagagaaaga | acaaaatcta | acactgagag | gctggggcat | ggaggaccag |
| 92821 | gagggctcaa | aggagacaga | aggagcagtc | aaggaggagt | caaggaggag | tcaagggccg |
| 92881 | aggaccagga | gggctttgag | tcctgaagca | gaacagtgca | tgtcagaaag | gaggatggac |
| 92941 | tgcagcagct | ttgtaggtca | agaagaacag | ggcatagtag | acaaccgctg | ggtctgacag |
| 93001 | cgtggtggtc | cctggtagaa | tcatgtcgct | aagagcctga | ctttggggta | aagaaaaagg |
| 93061 | aggaaaagga | atgggagaca | gagactacag | acttactcct | taatgaagct | gtgctctaca |
| 93121 | aagaggagaa | aaattgggac | ggtagctagc | atgggaatat | ccaatgactg | atccacgtgg |
| 93181 | atgcaaacgc | ctgccccctg | gcctcaattc | aggacacctt | ggcatggcca | ccccaagtcc |
| 93241 | agggatctct | gtgggctccg | ccaagattct | ggttgcagct | gtactactgt | tgaactcctc |
| 93301 | cggctgctca | atcctgctcc | tctctctccc | cagcaagtac | acacaactcc | gagttgaacc |
| 93361 | ccacccaaga | cacttccctt | ccccgcaccc | ccaaataaac | cacttccatt | ggaatcctgt |
| 93421 | ctcagaatct | gtttctgggg | aacccaaact | tagcccaaca | gcaggtctca | aggctgacag |
| 93481 | gaatgtggga | aattgaggga | aagtgtggga | accagaggaa | gatgggctgt | gggatgccac |
| 93541 | taagcaggtg | ggggggcctg | gatccagcgc | acaaggcgag | ggcctgcctt | aggaaagggg |
| 93601 | cttgtcactt | gcagcacttg | gtgcaggatt | caggtaggtg | gcatctgcag | aagatccctt |
| 93661 | ctgaataatt | ctattttgtc | agtgaaccag | aagcaaggtt | actactaagc | atgaagactg |
| 93721 | gggagaagtg | gggtttggag | aagaaaggag | actggtttgg | gSgcgggggg | ttgcagggaS |
| 93781 | gaaagtgaac | agactagaca | gtgagtcaca | ggacaactgc | gggaggacat | cctcaaggtg |
| 93841 | cctaagaaaa | caatagtcaa | tctggacata | tacctggtga | aactgtattt | caaggagaaa |
| 93901 | ggtaaaataa | agatattttt | agataaacac | aaaaggagag | actgtcccac | caacaactct |
| 93961 | cacaaaagga | cttttgaaat | ggatgcattt | caggaagaaa | gaaagtgatc | ccagacggaa |
| 94021 | gatctgggca | ggaaaaagga | gtgagaatct | tacagaagga | gacagggagt | tgtggatcca |
| 94081 | tcaggcctga | aatgtgatgg | tcagttggtc | agtttttgtg | agtcaacata | ttgctctttt |
| 94141 | ttctctctct | tttttttttt | tttttttttt | ggattggtga | ggtctggcta | tgttgcccag |
| 94201 | gctggtcccg | aacccctgag | ttcaagcgat | cctcccacct | cKgcctccca | aagtgctggg |
| 94261 | attacaggca | tgggccacca | cgcctggctc | aacacattgc | tctctaatgt | tattgttgct |
| 94321 | tgccccaagt | tccgtggagt | cttctatcac | ttgcagctga | gcaccctgac | ggatctacgc |
| 94381 | agccacttga | gagcgcgctt | tgccgcgtgc | ttggcgagaa | ggcgccaatc | aaccctttaa |
| 94441 | tccaatcatg | caatgattag | ggccttccag | gtggaggtgg | agctgaggtc | cttccgggag |
| 94501 | agagaaaaag | cctcacagca | ggcttactcc | tataaggtga | cacagacaca | atctcgtcac |
| 94561 | aggatgagga | gtagggaaat | ctcccaactt | gggcacacag | cgtgtgatct | cgccttgctt |
| 94621 | ttctccctgg | aggtgcagca | tcatcacagg | tgttggatgg | acagctggca | accaatgtaa |
| 94681 | atgcctgttt | ccccagctct | aataaacggg | cttaacagca | catgccctcg | tgcaccttag |
| 94741 | gaagccacat | gtattgcagc | tgggccactg | ggaaaaggca | cttctttctt | tcagaataag |
| 94801 | ggccaactRa | tgtatYatga | atgacccaac | aaccctacct | cttaaaacgc | tgtctgagag |
| 94861 | cctgagcaaa | ctggacctcg | ccagtggctg | gtgagagctc | tgtgttaatg | gtgctggatt |
| 94921 | cctgcggggg | cctgtgattc | cccgctccgt | agagagtagg | acagcacccc | gcctcctccg |
| 94981 | gacattgctg | cacagtgggt | gagccacctg | ctgccctgaa | caggaaggga | aggaggagcc |
| 95041 | gtcggagctt | | | | | |

[0439] Following are ICAM, MAPK10, KIAA0861, NUMA1, GALE, DPF3 and LOC145197 complementary DNA sequences (cDNAs; SEQ ID NO: 8, 9, 10, 11, 12, 13, 14, 15, 16 and 17, respectively). Following is an ICAM1 cDNA sequence (SEQ ID NO: 8).

NM_000201 [gi:4557877] Homo sapiens intercellular adhesion molecule 1 (CD54),
human rhinovirus receptor (ICAM1), mRNA

gcgccccagtcgacgctgagctcctctgctactcagagttgcaacctcagcctcgctatggctcccagcagcccccg
gcccgcgctgcccgcactcctggtcctgctcggggctctgttcccaggacctggcaatgcccagacatctgtgtccc
cctcaaaagtcatcctgccccggggaggctccgtgctggtgacatgcagcacctcctgtgaccagcccaagttgttg
ggcatagagaccccgttgcctaaaaaggagttgctcctgcctgggaacaaccggaaggtgtatgaactgagcaatgt
gcaagaagatagccaaccaatgtgctattcaaactgccctgatgggcagtcaacagctaaaaccttcctcaccgtgt
actggactccagaacgggtggaactggcacccctcccctcttggcagccagtgggcaagaaccttaccctacgctgc
caggtggagggtggggcaccccgggccaacctcaccgtggtgctgctccgtggggagaaggagctgaaacgggagcc
agctgtgggggagcccgctgaggtcacgaccacggtgctggtgaggagagatcaccatggagccaatttctcgtgcc
gcactgaactggacctgcggccccaagggctggagctgtttgagaacacctcggccccctaccagctccagaccttt
gtcctgccagcgactcccccacaacttgtcagcccccgggtcctagaggtggacacgcaggggaccgtggtctgttc
cctggacgggctgttcccagtctcggaggcccaggtccacctggcactgggggaccagaggttgaaccccacagtca
cctatggcaacgactccttctcggccaaggcctcagtcagtgtgaccgcagaggacgagggcacccagcggctgacg
tgtgcagtaatactggggaaccagagccaggagacactgcagacagtgaccatctacagctttccggcgcccaacgt
gattctgacgaagccagaggtctcagaagggaccgaggtgacagtgaagtgtgaggcccaccctagagccaaggtga
cgctgaatggggttccagcccagccactgggcccgagggcccagctcctgctgaaggccaccccagaggacaacggg
cgcagcttctcctgctctgcaaccctggaggtggccggccagcttatacacaagaaccagacccgggagcttcgtgt
cctgtatggcccccgactggacgagagggattgtccgggaaactggacgtggccagaaaattcccagcagactccaa
tgtgccaggcttgggggaacccattgcccgagctcaagtgtctaaaggatggcactttcccactgcccatcggggaa
tcagtgactgtcactcgagatcttgagggcacctacctctgtcgggccaggagcactcaaggggaggtcacccgcga
ggtgaccgtgaatgtgctctccccccggtatgagattgtcatcatcactgtggtagcagccgcagtcataatgggca
ctgcaggcctcagcacgtacctctataaccgccagcggaagatcaagaaatacagactacaacaggcccaaaaaggg
acccccatgaaaccgaacacacaagccacgcctccctgaacctatcccgggacagggcctcttcctcggccttccca
tattggtggcagtggtgccacactgaacagagtggaagacatatgccatgcagctacacctaccggccctgggacgc
cggaggacagggcattgtcctcagtcagatacaacagcatttggggccatggtacctgcacacctaaaacactaggc
cacgcatctgatctgtagtcacatgactaagccaagaggaaggagcaagactcaagacatgattgatggatgttaaa
gtctagcctgatgagaggggaagtggtgggggagacatagccccaccatgaggacatacaactgggaaatactgaaa
cttgctgcctattgggtatgctgaggcccacagacttacagaagaagtggccctccatagacatgtgtagcatcaaa
acacaaaggcccacacttcctgacggatgccagcttgggcactgctgtctactgaccccaacccttgatgatatgta
tttattcatttgttattttaccagctatttattgagtgtcttttatgtaggctaaatgaacataggtctctggcctc
acggagctcccagtccatgtcacattcaaggtcaccaggtacagttgtacaggttgtacactgcaggagagtgcctg
gcaaaaagatcaaatggggctgggacttctcattggccaacctgcctttccccagaaggagtgatttttctatcggc
acaaaagcactatatggactggtaatggttcacaggttcagagattacccagtgaggccttattcctcccttccccc
caaaactgacacctttgttagccacctccccacccacatacatttctgccagtgttcacaatgacactcagcggtca
tgtctggacatgagtgcccagggaatatgcccaagctatgccttgtcctcttgtcctgtttgcatttcactgggagc
ttgcactattgcagctccagtttcctgcagtgatcagggtcctgcaagcagtggggaagggggccaaggtattggag
gactccctcccagctttggaagggtcatccgcgtgtgtgtgtgtgtgtatgtgtagacaagctctcgctctgtcacc
caggctggagtgcagtggtgcaatcatggttcactgcagtcttgaccttttgggctcaagtgatcctcccacctcag
cctcctgagtagctgggaccataggctcacaacaccacacctggcaaatttgattttttttttttttttcagagacg
gggtctcgcaacattgcccagacttcctttgtgttagttaataaagctttctcaactgcc

[0440] Following is an ICAM4 cDNA sequence (SEQ ID NO: 9).

NM_001544 [gi:12545400] Homo sapiens intercellular adhesion molecule 4,
Landsteiner-Wiener blood group (ICAM4), transcript variant 1, mRNA.

ctttttgccatggggtctctgttccctctgtcgctgctgttttttttggcggccgcctacccgggagttgggagcgc
gctgggacgccggactaagcgggcgcaaagccccaagggtagccctctcgcgccctccgggacctcagtgcccttct
gggtgcgcatgagcccggagttcgtggctgtgcagccggggaagtcagtgcagctcaattgcagcaacagctgtccc
cagccgcagaattccagcctccgcaccccgctgcggcaaggcaagacgctcagagggccgggttgggtgtcttacca
gctgctcgacgtgagggcctggagctccctcgcgcactgcctcgtgacctgcgcaggaaaaacacgctgggccacct
ccaggatcaccgcctacaaaccgccccacagcgtgattttggagcctccggtcttaaagggcaggaaatacactttg
cgctgccacgtgacgcaggtgttcccggtgggctacttggtggtgaccctgaggcatggaagccgggtcatctattc
cgaaagcctggagcgcttcaccggcctggatctggccaacgtgaccttgacctacgagtttgctgctggaccccgcg
acttctggcagcccgtgatctgccacgcgcgcctcaatctcgacggcctggtggtccgcaacagctcggcacccatt
acactgatgctcgcttggagccccgcgcccacagctttggcctccggttccatcgctgcccttgtagggatcctcct
cactgtgggcgctgcgtacctatgcaagtgcctagctatgaagtcccaggcgtaaagggggatgttctatgccggct
gagcgagaaaaagaggaatatgaaacaatctggggaaatggccatacatggtggctgacgcctgtaatcccagcact
ttgggaggccgaggcaggagaatcgcttgagcccaggagttcgagaccagcctggacaacatagtgagaccccgtct
atgcaaaaaatacacaaattagcctggtgtggtggcccgcacctgtggtcccagctacccgggaggctgagttggga
ggatcctttgagccctgaaagtcgaggttgcagtgagccttgatcgtgccactgcactccagcctgggggacagagc
acgaccctgtctccaaaaataaaataaaaataaaaataaatattggcgggggaaccctctggaatcaataaaggctt
ccttaaccagc

[0441] Following is an ICAM5 cDNA sequence (SEQ ID NO: 10).

NM_003259 [gi:12545403] Homo sapiens intercellular adhesion molecule 5,
telencephalin (ICAM5), mRNA

ccgtcctctagcccagctcctcggctcgcgctctcctcgcctcctgtgctttccccgccgcggcgatgccagggcct
tcgccagggctgcgccgggcgctactcggcctctgggctgctctgggcctggggctcttcggcctctcagcggtctc
gcaggagcccttctgggcggacctgcagcctcgcgtggcgttcgtggagcgcgggggctcgctgtggctgaattgca
gcaccaactgccctcggccggagcgcggtggcctggagacctcgctgcgccgaaacgggacccagaggggtttgcgt
tggttggcgcggcagctggtggacattcgcgagccggagactcagcccgtctgcttcttccgctgcgcgcggcgcac
actacaggcgcgtgggctcattcgcactttccagcgaccagatcgcgtagagctgatgccgctgcctccctggcagc
cggtgggcgagaacttcaccctgagctgtagggtccccggcgccgggccccgtgcgagcctcacgctgaccctgctg
cggggcgcccaggagctgatccgccgcagcttcgccggtgaaccaccccgagcgcggggcgcggtgctcacagccac
ggtactggctcggagggaggaccatggagccaatttctcgtgtcgcgccgagctggacctgcggccgcacggactgg
gactgtttgaaaacagctcggcccccagagagctccgaaccttctccctgtctccggatgccccgcgcctcgctgct
ccccggctcttggaagttggctcggaaaggcccgtgagctgcactctggacggactgtttccagcctcagaggccag
ggtctacctcgcactgggggaccagaatctgagtcctgatgtcaccctcgaaggggacgcattcgtggccactgcca
cagccacagctagcgcagagcaggagggtgccaggcagctgatctgcaacgtcaccctggggggcgaaaaccgggag
acccgggagaacgtgaccatctacagcttcccggcaccactcctgaccctgagcgaacccagcgtctccgaggggca
gatggtgacagtaacctgcgcagctgggacccaagctctggtcacactggagggagttccagccgcggtcccggggc
agcccgcccagcttcagctaaatgccaccgagaacgacgacagacgcagcttcttctgcgacgccaccctcgatgtg
gacggggagaccctgatcaagaacaggagcgcagagcttcgtgtcctatacgctccccggctagacgattcggactg
ccccaggagttggacgtggcccgagggcccagagcagacgctgcgctgcgaggcccgcgggaacccagaaccctcag
tgcactgtgcgcgctccgacggcggggccgtgctggctctgggcctgctgggtccagtcactcgggcgctctcaggc
acttaccgctgcaaggcggccaatgatcaaggcgaggcggtcaaggacgtaacgctaacggtggagtacgcaccagc
gctggacagcgtgggctgcccagaacgcattacttggctggagggaacagaagcctcgctgagctgtgtggcgcacg
gggtaccgccgcctgatgtgatctgcgtgcgctctggagaactcggggccgtcatcgaggggctgttgcgtgtggcc
cgggagcatgcgggcacttaccgctgcgaagccaccaaccctcggggctctgcggccaaaaatgtggccgtcacggt
ggaatatggccccaggtttgaggagccgagctgccccagcaattggacatgggtggaaggatctgggcgcctgtttt
cctgtgaggtcgatgggaagccacagccaagcgtgaagtgcgtgggctccgggggcgccactgagggggtgctgctg
ccgctggcacccccagaccctagtcccagagctcccagaatccctagagtcctggcacccggtatctacgtctgcaa
cgccaccaaccgccacggctccgtggccaaaacagtcgtcgtgagcgcggagtcgccaccggagatggatgaatcta
cctgcccaagtcaccagacgtggctggaaggggctgaggcttccgcgctggcctgcgccgcccggggtcgcccttcc
ccaggagtgcgctgctctcgggaaggcatcccatggcctgagcagcagcgcgtgtcccgagaggacgcgggcactta
ccactgtgtggccaccaatgcgcatggcacggactcccggaccgtcactgtgggcgtggaataccggccagtggtgg
ccgaacttgctgcctcgccccctggaggcgtgcgcccaggaggaaacttcacgttgacctgccgcgcggaggcctgg
cctccagcccagatcagctggcgcgcgcccccgggggccctcaacatcggcctgtcgagcaacaacagcacactgag
cgtggcaggcgccatgggaagccacggcggcgagtacgagtgcgcacgcaccaacgcgcacgggcgccacgcgcggc
gcatcacggtgcgcgtggccggtccgtggctatgggtcgccgtgggcggcgcggcggggggcgcggcgctgctggcc
gcgggggccggcctggccttctacgtgcagtccaccgcctgcaagaagggcgagtacaacgtgcaggaggccgagag
ctcaggcgaggccgtgtgtctcaacggagcgggcggcggcgctggcggggcggcaggcgcggagggcggacccgagg
cggcggggggcgcggccgagtcgccggcggagggcgaggtcttcgccatacagctgacatcggcgtgagccgctccc
ctctccccgcgggccgggggacgccccccagactcacaogggggcttatttattgctttatttatttacttattcat
ttatttatgtattcaactccaagggcgtcacccccattttctacccatcccctcaataaagtttttataaagga

[0442] Following is a MAPK10 cDNA sequence (SEQ ID NO: 11).

NM_003259 [gi:12545403] Homo sapiens mitogen-activated protein kinase 10
(MAPK10), transcript variant 1, mRNA.

gagaaatggcgtggcaggggacccagcgagcccagagggattttgccgctgcttcctctacccctgtatttcacgca
gctctctaaattgactcagctccaggctagtgtgagaaacaccaacagcaggcccatctcagatcttcactatggca
acttatgcaagaaactgttgaattagacccgtttcctatagatgagaaaccatacaagctgtggtatttatgagcct
ccatttcttatactactgcagtgaaccaacattggatgtgaaaattgccttttgtcagggattcgataaacaagtgg
atgtgtcatatattgccaaacattacaacatgagcaaaagcaaagttgacaaccagttctacagtgtggaagtggga
gactcaaccttcacagttctcaagcgctaccagaatctaaagcctattggctctggggctcagggcatagtttgtgc
cgcgtatgatgctgtccttgacagaaatgtggccattaagaagctcagcagaccctttcagaaccaaacacatgcca
agagagcgtaccgggagctggtcctcatgaagtgtgtgaaccataaaaacattattagtttattaaatgtcttcaca
ccccagaaaacgctggaggagttccaagatgtttacttagtaatggaactgatggatgccaacttatgtcaagtgat
tcagatggaattagaccatgagcgaatgtcttacctgctgtaccaaatgttgtgtggcattaagcacctccattctg
ctggaattattcacagggatttaaaaccaagtaacattgtagtcaagtctgattgcacattgaaaatcctggacttt
ggactggccaggacagcaggcacaagcttcatgatgactccatatgtggtgacacgttattacagagcccctgaggt
catcctggggatgggctacaaggagaacgtggatatatggtctgtgggatgcattatgggagaaatggttcgccaca
aaatcctctttccaggaagggactatattgaccagtggaataaggtaattgaacaactaggaacaccatgtccagaa
ttcatgaagaaattgcaacccacagtaagaaactatgtggagaatcggcccaagtatgcgggactcaccttccccaa
actcttcccagattccctcttcccagcggactccgagcacaataaactcaaagccagccaagccagggacttgttgt
caaagatgctagtgattgacccagcaaaaagaatatcagtggacgacgccttacagcatccctacatcaacgtctgg
tatgacccagccgaagtggaggcgcctccacctcagatatatgacaagcagttggatgaaagagaacacacaattga
agaatggaaagaacttatctacaaggaagtaatgaattcagaagaaaagactaaaaatggtgtagtaaaaggacagc
cttctccttcagcacaggtgcagcagtgaacagcagtgagagtctccctccatcctcgtctgtcaatgacatctcct
ccatgtccaccgaccagaccctggcatctgacactgacagcagcctggaagcctcggcaggacccctgggttgttgc
aggtgactagccgcctgcctgcgaaacccagcgttcttcaggagatgatgtgatggaacacacacacacgcagacac
acacacacacacaaatgcagacacacaacatcaagaaaacagcaagggagagaatccaagcctaaaattaaataaat
ctttcagcctgcttcttccccagggttctgtattgcagctaagctcaaatgtatatttaacttctagttgctcttgc
tttggtcttcttccaatgatgcttactacagaaagcaaatcagacacaattagagaagccttttccataaagtgtaa
ttttaatggctgcaaaaccggcaacctgtaactgcccttttaaatggcatgacaaggtgtgcagtggccccatccag
catgtgtgtgtctctatcttgcatctacctgctccttggcctagtcagatggatgtagatacagatccgcatgtgtc
tgtattcatacagcactacttacttagagatgctactgtcagtgtcctcagggctctaccaagacataatgcactgg
ggtaccacatggtccatttcatgtgatctattactctgacataaacccatctgtaatatattgccagtatataagct
gtttagtttgttaattgattaaactgtatgtcttataagaaaacatgtaaagggggaatatatggggggagtgagct
ctctcagacccttgaagatgtagcttccaaatttgaatggattaaatggcacctgtatacca
Other isoforms are isoform 2 (NM_138982); isoform 3 (NM_138980); isoform 4
(NM_138981)

[0443] Following is a first KIAA0861 cDNA sequence (SEQ ID NO: 12).

KIAA0861 Coding Seguence (cDNA) Corresponding to SEQ ID NO:2. (cDNA from
positions 94 . . . 3189)

cgctgaattctaggggaggatggcgcccccatcatcacgttcccagagttttcggggttcaaacacatcccagatga
agacttcctgaatgtcatgacctacctgactagcatccccagtgtggaggctgccagcattggattcattgttgtta
tcgacagacgaagagacaagtggagctccgtaaaggcatccttgacacgaatagctgtggcatttccaggaaactta
cagctcatattcatccttcgtccatctcgctttatccagaggacattcactgacattggcattaaatactatcgaaa
tgagtttaaaacgaaagtgccgatcatcatggtaaactctgtctctgaccttcacggctacatcgacaaaagccaac
tgacccgggaattaggggggactttggaatatcgccacggtcagtgggtaaatcaccgcactgccatcgaaaacttt
gccttgaccttgaagaccactgcccagatgctgcagacgtttgggtcctgcctggccacagcagagctgcccagaag
catgctatccacggaagaccttctcatgtcccacacaaggcagcgggacaagctgcaggatgagctgaaattacttg
gaaagcaggggaccacattgctgtcatgcatccaagaaccagcaaccaaatgtcccaacagcaaactcaatctcaac
caacttgagaatgtaactaccatggaaaggttattagttcaactggatgaaacagaaaaagcctttagtcacttttg
gtctgagcatcatctgaagcttaaccagtgcctacaactacagcattttgagcacgatttttgtaaggctaagcttg
ccctggataatttgctggaagagcaagcagagtttacaggcattggagacagcgtgatgcacgtggagcagattctt
aaggaacacaaaaaactggaggaaaaaagccaggagtccctggaaaaggcccagctgctggcactggttggggacca
gctcatccaaagccaccattatgcagcagatgccatcaggccccggtgtgtggagctcaggcacctctgtgacgatt
tcatcaatggaaacaagaaaaaatgggacattttaggaaagtccttagagtttcatagacagctggacaaggtcagc
caatggtgtgaggcaggaatctacctcttggcttcccaagctgtagacaagtgccagtctcgagaaggggttgatat
cgccttgaacgacattgcgacattcctgggcacagtcaaggagtacccgttgctcagccccaaggagttttacaacg
agtttgagttgctgctcaccctcgatgcaaaggccaaagcccagaaagttttgcagaggctggatgatgtccaggaa
atatttcacaagaggcaagtgagtctgatgaaactggcagccaaacagactcgtccagtgcaacctgtggccccaca
tcctgagtcttcaccaaaatgggtgtcatcaaaaaccagccagccctccacctcggtccctctagctcgtcctctga
gaacgtctgaggaaccttatacggagacagagttgaactcccggggaaaggaagatgatgagactaaatttgaagtc
aagagtgaagaaatctttgaaagccatcatgaaagggggaaccctgagctggagcagcaggccaggctcggagacct
ttccccccgcaggcgcattatacgtgacttgcttgagactgaagagatttacataaaagagattaaaagcataattg
atggatatatcactccaatggattttatttggctaaagcatctaattccagatgttcttcagaataacaaggacttt
ctctttgggaatattagagaactttacgaatttcacaacaggacttttctaaaagagttggaaaagtgtgctgagaa
ccctgaacttctggcacattgctttctcaagagaaaagaagatcttcagatatattttaaataccataagaatctgc
cccgagctagggcaatctggcaagagtgtcaagactgcgcctactttggggtatgccagcgccaactggatcacaat
ctccctctttttaagtatctcaaaggaccaagccagagacttataaaataccagatgctgttgaagggtctgctgga
tttcgagtctcctgaagatatggagatagacccaggtgaactaggaggctcggctaaggatgggccaaagagaacca
aagattcagcattctcaactgaactacaacaagctttggcagtgatagaggatttgatcaagtcctgtgagttggct
gtggacctagcagcagtgactgaatgtccggacgatattggaaaactaggcaagctgttgctgcacggccctttcag
cgtctggacaattcacaaggatcgttataaaatgaaggatttgattcgatttaaacccagccagaggcaaatctacc
tatttgaaaggggaatagtgttctgtaagatacgaatggagcctggggaccagggattatctcctcattacagcttc
aagaaggccatgaagctgatgacactttcaattcgccagcttggaagggggagccatagaaagtttgagattgccag
tcgaaatggacttgagaaatacatcctgcaggcagcttcaaaagaaatcagagactgttggttttcagaaataagta
aattattgatggaacaacaaaataatatcaaagaccaaggaaatccacagtttgaaatgagcacgagcaaaggcagt
ggagcaggatccggaccatggattaaaaatatggaaagagctaccactagcaaggaagacccggcctccagcacagg
agggattaaaggctgctccagcagggagtttagctccatggacacctttgaagactgtgaaggcgcagaagacatgg
aaaaggagagcagtgctctgagtctcgcgggccttttccagtcggacgacagtcacgaaacctgttcctccaaatct
gctttcctggagaggggagaaagcagccagggagaaaaagaagaacgcgatgaggaggaaacggcgacccgcagcac
cgaggaggagcgcgctggggcgtccacgggccggctggctcctgcgggggcgacggctggtttccaggcgagggcgc
tgcgcccgaggacctccgcccaggagagctga

[0444] Following is a second KIAA0861 cDNA sequence (SEQ ID NO: 13).

(4772 bp)
ttgggcggagatgcctttaaaaaatcatccaccgcagcggtagaaacagttttgtttggctttatttatacggaatg
gtttttcagtgaaatgctgtcttgcttaaaagaagagatgcctccccaggagctcacccggcgactggccacagtga
tcactcatgtcgatgaaattatgcagcaggaagtcagacccctgatggcggtggagataatagaacaacttcacaga
caatttgccattctttcaggaggccgaggggaggatggcgcccccatcatcacgttcccagagttttcggggttcaa
acacatcccagatgaagacttcctgaatgtcatgacctacctgactagcatccccagtgtggaggctgccagcattg
gattcattgttgttatcgacagacgaagagacaagtggagctccgtaaaggcatccttgacacgaatagctgtggca
tttccaggaaacttacagctcatattcatccttcgtccatctcgctttatccagaggacattcactgacattggcat
taaatactatcgaaatgagtttaaaacgaaagtgccgatcatcatggtaaactctgtctctgaccttcacggctaca
tcgacaaaagccaactgacccgggaattaggggggactttggaatatcgccacggtcagtgggtaaatcaccgcact
gccatcgaaaactttgccttgaccttgaagaccactgcccagatgctgcagacgtttgggtcctgcctggccacagc
agagctgcccagaagcatgctatccacggaagaccttctcatgtcccacacaaggcagcgggacaagctgcaggatg
agctgaaattacttggaaagcaggggaccacattgctgtcatgcatccaagaaccagcaaccaaatgtcccaacagc
aaactcaatctcaaccaacttgagaatgtaactaccatggaaaggttattagttcaactggatgaaacagaaaaagc
ctttagtcacttttggtctgagcatcatctgaagcttaaccagtgcctacaactacagcattttgagcacgattttt
gtaaggctaagcttgccctggataatttgctggaagagcaagcagagtttacaggcattggagacagcgtgatgcac
gtggagcagattcttaaggaacacaaaaaactggaggaaaaaagccaggagcccctggaaaaggcccagctgctggc
actggttggggaccagctcatccaaagccaccattatgcagcagatgccatcaggccccggtgtgtggagctcaggc
acctctgtgacgatttcatcaatggaaacaagaaaaaatgggacattttaggaaagtccttagagtttcatagacag
ctggacaaggtcagccaatggtgtgaggcaggaatctacctcttggcttcccaagctgtagacaagtgccagtctcg
agaaggggttgatatcgccttgaacgacattgcgacattcctgggcacagtcaaggagtacccgttgctcagcccca
aggagttttacaacgagtttgagttgctgctcaccctcgatgcaaaggccaaagcccagaaagttttgcagaggctg
gatgatgtccaggaaatatttcacaagaggcaagtgagtctgatgaaactggcagccaaacagactcgtccagtgca
acctgtggccccacatcctgagtcttcaccaaaatgggtgtcatcaaaaaccagccagccctccacctcggtccctc
tagctcgtcctctgagaacgtctgaggaaccttatacggagacagagttgaactcccggggaaaggaagatgatgag
actaaatttgaagtcaagagtgaagaaatctttgaaagccatcatgaaagggggaaccctgagctggagcagcaggc
caggctcggagacctttccccccgcaggcgcattatacgtgacttgcttgagactgaagagatttacataaaagaga
ttaaaagcataattgatggatatatcactccaatggattttatttggctaaagcatctaattccagatgttcttcag
aataacaaggactttctctttgggaatattagagaactttacgaatttcacaacaggacttttctaaaagagttgga
aaagtgtgctgagaaccctgaacttctggcacattgctttctcaagagaaaagaagatcttcagatatattttaaat
accataagaatctgccccgagctagggcaatctggcaagagtgtcaagactgcgcctactttggggtatgccagcgc
caactggatcacaatctccctctttttaagtatctcaaaggaccaagccagagacttataaaataccagatgctgtt
gaagggtctgctggatttcgagtctcctgaagatatggagatagacccaggtgaactaggaggctcggctaaggatg
ggccaaagagaaccaaagattcagcattctcaactgaactacaacaagctttggcagtgatagaggatttgatcaag
tcctgtgagttggctgtggacctagcagcagtgactgaatgtccggacgatattggaaaactaggcaagctgttgct
gcacggccctttcagcgtctggacaattcacaaggatcgttataaaatgaaggatttgattcgatttaaacccagcc
agaggcaaatctacctatttgaaaggggaatagtgttctgtaagatacgaatggagcctggggaccagggattatct
cctcattacagcttcaagaagaccatgaagctgatgacactttcaattcgccagcttggaagggggagccatagaaa
gtttgagattgccagtcgaaatggacttgagaaatacatcctgcaggcagcttcaaaagaaatcagagactgttggt
tttcagaaataagtaaattattgatggaacaacaaaataatatcaaagaccaaggaaatccacagtttgaaatgagc
acgagcaaaggcagtggagcaggatccggaccatggattaaaaatatggaaagagctaccactagcaaggaagaccc
ggcctccagcacaggagggattaaaggctgctccagcagggagtttagctccatggacacctttgaagactgtgaag
gcgcagaagacatggaaaaggagagcagtgctctgagtctcgcgggccttttccagtcggacgacagtcacgaaacc
tgttcctccaaatctgctttcctggagaggggagaaagcagccagggagaaaaagaagaacgcgatgaggaggaaac
ggcgacccgcagcaccgaggaggagcgcgctggggcgtccacgggccggctggctcctgcgggggcgacggctggtt
tccaggcgagggcgctgcgcccgaggacctccgcccaggagagctgacctccctgcggacgcccccgctcctcggct
ccagagcgcccgcattcccgggagaggcggtgtgggggcccgggccctgcccagctacgcagaaagcagccggagcc
tcggcggcggcagaaaggggacaaccagggcctcctccgaggagcccgaggggtgtcctgggtgcgcgcctagctcc
gcacgggggacctcggagctgctctaaggcgcctgcagaggcgagcagagcccgcagcccacgccttctcgaccgcg
cacttcgacattcggagccgggcaattctttgctgcgtgggcttctctgtgctcccacggtaggatgtttagtagca
cccctggcctctacccactaggtgccaggaatgcgccaccccatcctccaccccgcccccaaatcgtgacaatcaaa
aatgcctgcagacacgcccgcatttctccagggcggggtgggaatcggttgagagccgcttagcccgagccttggag
gagccggagccgctcaaacccggcgggggccgcagactgggagctcccggtccgcctcccagcatccctgcgagcgt
tcatggggtgttcgtgttagtgccaagattgcttcgttgtagagagagttcgttccaagttactttctgaggtattt
tatgtatcgatttattagtttttaaatgagttttgttagtttcagttgtattttatttttagttttattagttgatt
ttcatttctttgtagctttctggttatttaattttatagtttcagttactggtttatagttactttattttcaaagt
tatttagttgttcattttcagttatttatatgtagttgttttgttttaggagttacagatgttcaaattaatttgct
tggaatttatttatttatttatttatttatttttcgagacggagtctcgctctgtcgcccaggctggagtgcagtgg
tgtgatctcggctcactgcaaaccgcctcccgggctcacgccattctcctgcctcagcctcctgagtagctgggact
acaggcgcccgccaccacgcccggctaattttttatttggatttttagtagagacggggtttccccgtgttagccag
gatggtctcgatctcctgacctcgtgatccccctgcctcggcctcccaaagtgctgggattacaggcgtgagccacc
gcgcccagccggaatttatttttaattatctttacaattattatctgagttatttaccttcatagttatttcacttt
atcttattggagtttttgagttatttatttttacagtaacttatttgactattaaacactcactggaagttcatg

[0445] Following is a NUMA1 cDNA sequence (SEQ ID NO: 14).

NM_006185 [gi:5453819] Homo sapiens nuclear mitotic apparatus protein 1
(NUMA1), mRNA.

gcccacgaagaggtacgattccggagaatcgcgaggcagagcgggagcgcgcagccaggtggaaactaattctaagc
cagactgctggagatcaccctgttctagtgtgtggaggcttccaccaggagtctggagtgcaatggcacgatctcgg
ctcactgcaacctccacctcccaggttcaagcgattctcctgcctcagcctcccaagtagctgggattacaggcgca
ttggagtgactgtctggcatcaccaagatgacactccacgccacccggggggctgcactcctctcttgggtgaacag
tctacacgtggctgaccctgtggaggctgtgctgcagctccaggactgcagcatcttcatcaagatcattgacagaa
tccatggcactgaagagggacagcaaatcttgaagcagccggtgtcagagagactggactttgtgtgcagttttctg
cagaaaaatcgaaaacatccctcttccccagaatgcctggtatctgcacagaaggtgctagagggatcagagctgga
actggcgaagatgaccatgctgctcttataccactctaccatgagctccaaaagtcccagggactgggaacagtttg
aatataaaattcaggctgagttggctgtcattcttaaatttgtgctggaccatgaggacgggctaaaccttaatgag
gacctagagaacttcctacagaaagctcctgtgccttctacctgttctagcacattccctgaagagctctccccacc
tagccaccaggccaagagggagattcgcttcctagagctacagaaggttgcctcctcttccagtgggaacaactttc
tctcaggttctccagcttctcccatgggtgatatcctgcagaccccacagttccagatgagacggctgaagaagcag
cttgctgatgagagaagtaatagggatgagctggagctggagctagctgagaaccgcaagctcctcaccgagaagga
tgcacagatagccatgatgcagcagcgcattgaccgcctagccctgctgaatgagaagcaggcggccagcccactgg
agcccaaggagcttgaggagctgcgtgacaagaatgagagccttaccatgcggctgcatgaaaccctgaagcagtgc
caggacctgaagacagagaagagccagatggatcgcaaaatcaaccagctttcggaggagaatggagacctttcctt
taagctgcgggagtttgccagtcatctgcagcagctacaggatgccctcaatgagctgacggaggagcacagcaagg
ccactcaggagtggctagagaagcaggcccagctggagaaggagctcagcgcagccctgcaggacaagaaatgcctt
gaagagaagaacgaaatccttcagggaaaactttcacagctggaagaacacttgtcccagctgcaggataacccacc
ccaggagaagggcgaggtgctgggtgatgtcttgcagctggaaaccttgaagcaagaggcagccactcttgctgcaa
acaacacacagctccaagccagggtagagatgctggagactgagcgaggccagcaggaagccaagctgcttgctgag
cggggccacttcgaagaagaaaagcagcagctgtctagcctgatcactgacctgcagagctccatctccaacctcag
ccaggccaaggaagagctggagcaggcctcccaggctcatggggcccggttgactgcccaggtggcctctctgacct
ctgagctcaccacactcaatgccaccatccagcaacaggatcaagaactggctggcctgaagcagcaggccaaagag
aagcaggcccagctagcacagaccctccaacagcaagaacaggcctcccagggcctccgccaccaggtggagcagct
aagcagtagcctgaagcagaaggagcagcagttgaaggaggtagcggagaagcaggaggcaactaggcaggaccatg
cccagcaactggccactgctgcagaggagcgagaggcctccttaagggagcgggatgcggctctcaagcagctggag
gcactggagaaggagaaggctgccaagctggagattctgcagcagcaacttcaggtggctaatgaagcccgggacag
tgcccagacctcagtgacacaggcccagcgggagaaggcagagctgagccggaaggtggaggaactccaggcctgtg
ttgagacagcccgccaggaacagcatgaggcccaggcccaggttgcagagctagagttgcagctgcggtctgagcag
caaaaagcaactgagaaagaaagggtggcccaggagaaggaccagctccaggagcagctccaggccctcaaagagtc
cttgaaggtcaccaagggcagccttgaagaggagaagcgcagggctgcagatgccctggaagagcagcagcgttgta
tctctgagctgaaggcagagacccgaagcctggtggagcagcataagcgggaacgaaaggagctggaagaagagagg
gctgggcgcaaggggctggaggctcgattactgcagcttggggaggcccatcaggctgagactgaagtcctgcggcg
ggagctggcagaggccatggctgcccagcacacagctgagagtgagtgtgagcagctcgtcaaagaagtagctgcct
ggcgtgacgggtatgaggatagccagcaagaggaggcacagtatggcgccatgttccaggaacagctgatgactttg
aaggaggaatgtgagaaggcccgccaggagctgcaggaggcaaaggagaaggtggcaggcatagaatcccacagcga
gctccagataagccggcagcagaacaaactagctgagctccatgccaacctggccagagcactccagcaggtccaag
agaaggaagtcagggcccagaagcttgcagatgacctctccactctgcaggaaaagatggctgccaccagcaaagag
gtggcccgcttggagaccttggtgcgcaaggcaggtgagcagcaggaaacagcctcccgggagttagtcaaggagcc
tgcgagggcaggagacagacagcccgagtggctggaagagcaacagggacgccagttctgcagcacacaggcagcgc
tgcaggctatggagcgggaggcagagcagatgggcaatgagctggaacggctgcgggccgcgctgatggagagccag
gggcagcagcaggaggagcgtgggcagcaggaaagggaggtggcgcggctgacccaggagcggggccgtgcccaggc
tgaccttgccctggagaaggcggccagagcagagcttgagatgcggctgcagaacgccctcaacgagcagcgtgtgg
agttcgctaccctgcaagaggcactggctcatgccctgacggaaaaggaaggcaaggaccaggagttggccaagctt
cgtggtctggaggcagcccagataaaagagctggaggaacttcggcaaaccgtgaagcaactgaaggaacagctggc
taagaaagaaaaggagcacgcatctggctcaggagcccaatctgaggctgctggcaggacagagccaacaggcccca
agctggaagcactgcgggcagaggtgagcaagctggaacagcaatgccagaagcagcaggagcaggctgacagcctg
gaacgcagcctcgaggctgagcgggcctcccgggctgagcgggacagtgctctggagactctgcagggccagttaga
ggagaaggcccaggagctagggcacagtcagagtgccttagcctcggcccaacgggagttggctgccttccgcacca
aggtacaagaccacagcaaggctgaagatgagtggaaggcccaggtggcccggggccggcaagaggctgagaggaaa
aatagcctcatcagcagcttggaggaggaggtgtccatcctgaatcgccaggtcctggagaaggagggggagagcaa
ggagttgaagcggctggtgatggccgagtcagagaagagccagaagctggaggagagctgcgcctgctgcaggcaga
gacagccagcaacagtgccagagctgcagaacgcagctctgctctgcgggaggaggtgcagagcctccgggagggag
gctgagaaacagcgggtggcttcagagaacctgcggcaggagctgacctcacaggctgagcgtgcggaggagctggg
ccaagaattgaaggcgtggcaggagaagttcttccagaaagagcaggccctctccaccctgcagctcgagcacacca
gcacacaggccctggtgagtgagctgctgccagctaagcacctctgccagcagctgcaggccgagcaggccgctgcc
gagaaacgccaccgtgaggagctggagcagagcaagcaggccgctgggggactgcgggcagagctgctgcgggccca
gcgggagcttggggagctgattcctctgcggcagaaggtggcagagcaggagcgaacagctcagcagctgcgggcag
agaaggccagctatgcagagcagctgagcatgctgaagaaggcgcatggcctgctggcagaggagaaccgggggctg
ggtgagcgggccaaccttggccggcagtttctggaagtggagttggaccaggcccgggaaaagtatgtccaagagtt
ggcagccgtacgtgctgatgctgagacccgtctggctgaggtgcagcgagaagcacagagcactgcccgggagctgg
aggtgatgactgccaagtatgagggtgccaaggtcaaggtcctggaggagaggcagcggttccaggaagagaggcag
aaactcactgcccaggtggaagaactgagtaagaaactggctgactctgaccaagccagcaaggtgcagcagcagaa
gctgaaggctgtccaggctcagggaggcgagagccagcaggaggcccagcgcttccaggcccagctgaatgaactgc
aagcccagttgagccagaaggagcaggcagctgagcactataagctgcagatggagaaagccaaaacacattatgat
gccaagaagcagcagaaccaagagctgcaggagcagctgcggagcctggagcagctgcagaaggaaaacaaagagct
gcgagctgaagctgaacggctgggccatgagctacagcaggctgggctgaagaccaaggaggctgaacagacctgcc
gccaccttactgcccaggtgcgcagcctggaggcacaggttgcccatgcagaccagcagcttcgagacctgggcaaa
ttccaggtggcaactgatgctttaaagagccgtgagccccaggctaagccccagctggacttgagtattgacagcct
ggatctgagctgcgaggaggggaccccactcagtatcaccagcaagctgcctcgtacccagccagacggcaccagcg
tccctggagaaccagcctcacctatctcccagcgcctgccccccaaggtagaatccctggagagtctctacttcact
cccatccctgctcggagtcaggcccccctggagagcagcctggactccctgggagacgtcttcctggactcgggtcg
taagacccgctccgctcgtcggcgcaccacgcagatcatcaacatcaccatgaccaagaagctagatgtggaagagc
cagacagcgccaactcatcgttctacagcacgcggtctgctcctgcttcccaggctagcctgcgagccacctcctct
actcagtctctagctcgcctgggttctcccgattatggcaactcagccctgctcagcttgcctggctaccgccccac
cactcgcagttctgctcgtcgttcccaggccggggtgtccagtggggcccctccaggaaggaacagcttctacatgg
gcacttgccaggatgagcctgagcagctggatgactggaaccgcattgcagagctgcagcagcgcaatcgagtgtgc
cccccacatctgaagacctgctatcccctggagtccaggccttccctgagcctgggcaccatcacagatgaggagat
gaaaactggagacccccaagagaccctgcgccgagccagcatgcagccaatccagatagccgagggcactggcatca
ccacccggcagcagcgcaaacgggtctccctagagccccaccagggccctggaactcctgagtctaagaaggccacc
agctgtttcccacgccccatgactccccgagaccgacatgaagggcgcaaacagagcactactgaggcccagaagaa
agcagctccagcttctactaaacaggctgaccggcgccagtcgatggccttcagcatcctcaacacacccaagaagc
tagggaacagccttctgcggcggggagcctcaaagaaggccctgtccaaggcttcccccaacactcgcagtggaacc
cgccgttctccgcgcattgccaccaccacagccagtgccgccactgctgccgccattggtgccacccctcgagccaa
gggcaaggcaaagcactaaagggccagtaccagtgagtggccccacctgtgtccccgatgctgccgtcacctggtcc
tccgcctactgtccctctcagtgccttctctcagctcccaggccaacagtagccaaacccctagagacagtgatgcc
tgcccgcaccctggcctggcccctggtccttcactggcgccttctcggagctggcccagggggcctggagcatggac
agtgtgggcgctctccctaccttgcctccttttttcttaaagcaaagtcacttctccatcacaaccagatttgaggc
tggttttgatggctgggtccttgggcctggccagtcttcctcttagcctctggatctagaagggaccataagaggag
taggccctggttcctgctgtcctggtggctgggccagcaggggccctcactcttgaagtccaggactgggtctgacc
tggtgggagcacctgccagaggatgctctttcccaggacggatgggccctgtgtctcaggagtggggttgggggaca
gccttcagcagcagctcacaccctaccttccccagacttgcactggggtgggatttggagtgatgggaaggttttta
agggccggggatggatcttttctaaatgttattacttgtaaataaagtctattttt

[0446] Following is a GALE cDNA sequence (SEQ ID NO: 15).

NM_000403.2 [GI:9945333] Homo sapiens galactose-4-epimerase, UDP-(GALE),
mRNA.

gactctccagtcctcagtcaccttggacaaagaagtgtggatcctcagattccatcttttccaactccaaggtgcca
tggcagagaaggtgctggtaacaggtggggctggctacattggcagccacacggtgctggagctgctggaggctggc
tacttgcctgtggtcatcgataacttccataatgccttccgtggagggggctccctgcctgagagcctgcggcgggt
ccaggagctgacaggccgctctgtggagtttgaggagatggacattttggaccagggagccctacagcgtctcttca
aaaagtacagctttatggcggtcatccactttgcggggctcaaggccgtgggcgagtcggtgcagaagcctctggat
tattacagagttaacctgaccgggaccatccagcttctggagatcatgaaggcccacggggtgaagaacctggtgtt
cagcagctcagccactgtgtacgggaacccccagtacctgccccttgatgaggcccaccccacgggtggttgtacca
acccttacggcaagtccaagttcttcatcgaggaaatgatccgggacctgtgccaggcagacaagacttggaacgta
gtgctgctgcgctatttcaaccccacaggtgcccatgcctctggctgcattggtgaggatccccagggcatacccaa
caacctcatgccttatgtctcccaggtggcgatcgggcgacgggaggccctgaatgtctttggcaatgactatgaca
cagaggatggcacaggtgtccgggattacatccatgtcgtggatctggccaagggccacattgcagccttaaggaag
ctgaaagaacagtgtggctgccggatctacaacctgggcacgggcacaggctattcagtgctgcagatggtccaggc
tatggagaaggcctctgggaagaagatcccgtacaaggtggtggcacggcgggaaggtgatgtggcagcctgttacg
ccaaccccagcctggcccaagaggagctggggtggacagcagccttagggctggacaggatgtgtgaggatctctgg
cgctggcagaagcagaatccttcaggctttggcacgcaagcctgaggaccctcccctaccaaggaccaggaaaagca
gcagctgcctgctctccagcctctggaggaactcagggccctggagctgctggggccaagccaagggcctcccctac
ctcaaaccccagctgggcccgcttagcccaccaggcatgaggccaaggctccactgaccaggaggccgaggtctcta
actcttatcttccacagggtccaagagttcatcaggacccccaagagtgagtgagggggcaaggctctggcacaaaa
cctcctcctcccaggcactcatttatattgctctgaaagagctttccaaagtatttaaaaataaaaacaagttttct
tacactgg

[0447] Following is a DPF3 cDNA sequence (SEQ ID NO: 16).

NM_012074 [gi:13442997] Homo sapiens D4, zinc and double PHD fingers,
family 3 (DPF3), mRNA.

acattgtagcaaaatggcgactgtcattcacaaccccctgaaagcgctcggggaccagttctacaaggaagccattg
agcactgccggagttacaactcacggctgagtgcagagcgcagcgtgcgtcttcccttcctggactcacagactggg
gtggcccagaacaactgctacatctggatggagaagaggcaccgaggcccaggccttgccccgggccagctgtatac
ataccctgcccgctgctggcgcaagaagagacgattgcacccacctgaagatccaaaactgcggctgctggagataa
aacctgaagtggagcttcccctgaagaaggatgggttcacctcagagagcaccacgctggaagccttgctccgtggc
gagggggttgagaagaaggtggatgccagggaggaggaaagcatccaggaaatacagagggttttggaaaatgatga
aaatgtagaagaagggaatgaagaagaggatttggaagaggatattcccaagcgaaaggacaggactagaggacggg
ctcgctgccctctcccttccctgcactgtttttcctcccttccctctgccgtgatagatgctaaggagtggggtgga
ggtgggaagtgggaagcaacagtggcgtataggaaaaagaaaatataccccgtgcacattttcaacatgtagttgaa
gaagcctaaattaggtactagaaaaaaaaaaaggacagaaacactgcctgatatgtgagcaagagcatgaaaatata
gaatgattatctcagagcagaggaggtggggagcaggtggctggagagaggcggggtaggtaggcagggcgtccctg
gctcaccaatgcgtctggtccacatggcatttgggaaagcagatgggtcatgcttttgcaatgaatggtcagatgct
tagggggcatttgtgctcctctggccaggaaagggaacagagtccatccaagctgccccccactcatctgccatggt
tgtccaccctgggggtttttcctctgaaggaaaatgaacccatcttttgcctgccatgaatcattgcagggcaggct
gttactggctaaattaaaacccttggcagggcatcgactgtgtgcgaggcaatgctctaggtcctgtaggggctgga
aaataaaccgcatgctggcctagccttcaagttgcttttcagccatgaaactaagctctgccaagcaatcgtgattg
taggtcaagtatcgcgccatcacggaaggtgtaagtatatgtaggtttctctgttgaggatgcgtgttcctcagtag
aagacaagcaggtggaggcatccagtgatttctaccctgtggaggctgaggggtcgggggaagaaaacagatgacct
cagcctagttgctttaatctgcttttccaagcactggatgcccttggatgacagcatcctcagcattaaaactggtg
aactgatgaagtcacctggcctggagtgtgttgggcagccagtgtccccagagctgcttgtgggtttctggggtgga
aggcagggaggtgcaactggcagggcctgatcagaggcagaaaatgacccccacagtggtcttttccctgctagaga
aagcagagagcgggactgggggggtgggggcttcaagtacagattgggcacactccaccagaccccagcaaggtcag
ctgccccacgcctgtatctggcactgctggtgtgtgcagggatgaaacccagcatcagagaggttttcagcaaacct
tccatgctcacctttggccaggtgcttgtcagatcctagcttcgtgctggcttagactctcagttgtttgtgttgac
agcattaggaataaaccgtttgtttcatctttccttttctccacacgtgtcacagccagatttcagctttgagttat
tccctgaagaagccacaccaaccttgctttcaagcaaaatgcctgggcttgggggaaggtgtgtatctgtccatgtg
tggatgtcggctcagagctatagcttctctgtggggggtggcccaagggaaggctcctctggggccctggatggcac
atgactcccagtgaggagaattcaggtgatctctgtggaggtagtcagggacacaaggcttggctgtgagtctggtt
ttaaagtgcgtgacagcctgaaaagcatgcaggggtttggtccactcacctacttgaaagcctgtgggcaacgttct
tttgagccaagacttctctgaatggccctgctggtggaaggggtgaggcaaaggcctctgacttggaccctttccac
accagactggcagcacttcccccaggcagccagtggtgggccctgagccctcaggtccccagctccttgagggatga
acctgggagcccaagagccagtggctgagctctgagaaggctccatctcccacctgcccttgagcgcgctctcaggc
tgagaacacggtctcatcaggcgccttcctggcctgatgctgtgctgtctacgtcacacggtcgattcacaaaagcc
agaactagacctcaaccaggtcatctccccgttgccaagtgggttcagggtgagggcaatttgtaagctcaatttct
ctgacagccaagacatggagcatctctgctaagaagccaaaagaaattggttttcttcttctcattgctgaagcccc
tctgtgtctcttctcagggacaggctggtccagtggctttggtgagggcgcctccatttgtgaacgctgggattcct
ctgggtgggctttggcaggtggctcctatggtaggaaggatgaccaggtccctgggaatgagctgcctacctgctgc
tccacgaggaagctcaggcctgcacaggctccaccaggccttggatgccctctagttgagtcagagaccctggaaac
acactgagatctccaattgctgcctccattgatgtctctagacctgcagatacgaagcaaacctgggattgcttctt
ccaggtatgggcaccagagagggaggccactgcaacattttatccccatcattccaaaatgcttgcttgtctctttt
acctcacactcacaactccttctgagactctcagtcataaaggaatgaccaagagagtgggtctccagtgagagaaa
tgcctatgaaagagggtttccctttttgctcttttgaacaccctccccactgatccttgggacccaacgccgcattg
cctcttgcagatgaggttttgccttgggctgcttgggtacttcagaccaggactgagtctgacacagctttcatgag
gttacagaaaagggctacagatttgggaagctgtgtgtaatggtcttgagacaatatctccatttggcccaccctgg
cttctctaaaaagcaacgacagcaacagacaaacaaaaagctcccacctcccaccccgttagctgtcctcctccttc
actgtgatgtggttgcggtctctgtaggtgtgtgtgccacccttgtcctctgtcctctggggatgtgcccttcccac
gtgtgtcaggttcccactctttcgtggttcctaacgtgaagtgctgtgatgtttctgccctgcctaaggaacgtatc
aagctctctcagtgtttcagtgttggagattgaggctgtgccacatcttctgccatcctaaggggacatgatggttc
tgtgattcccagagagctggcagattgtgacaatctccaggagaacctacagattggaagcagcccacacctgatgt
ggactcctgtcccgggactcactcttcattcagaagactggtggcccacgtgccaggaccaccccacctctcttgct
gccttttctcctgtcctgatggggttctgggagggagacctgtcgctgatgagatgaagaatgtggggatcgagcag
ccttcttctttgggacccctcgatatcccatggaatgctcgcacgttctcaaagactgagtcacaagcccctacccc
ttccttgctgtggttagtatcttgttctgtgattggttagcaatgttgactacccacgtagtgaatcttttgtctgc
aatttagagaatgtgtaaacaaataaaaggctttaaaactc

[0448] Following is a LOC145197 cDNA sequence (SEQ ID NO: 17).

XM_096734.1 GI:18582778: Homo sapiens hypothetical LOC145197 (LOC145197),
mRNA.

agtgcaatgagcttcatgctgaatactgatttgaagtgtggttcaccacacagacttaaattgtccttcccacaact
ttatctgagaagcatgacaacggtgacaatcacaggactagttttattggtcaggatgtggtgttactatattaaag
cgcttcaagttttcatagcgctcgtcaaacagagacctcggaacgctctgcagacattaattaatgttcgctccggc
cctggaagccatttcaccaatggaaattccgatgagaaaggaagaaacgaggggttcaaggccgcgccgttgtgagt
ccgctgcggaactaggaactgaaaccccgtggttcccaatgagccagcgaaagtctgtcgaagtattgagcacccct
attgaagactgtgggagttttggcggcttaatgggattgtgttcggtccttcaggctctcctttaaaagattccatg
gcaccaacgagactccaataaaagggcctctctaa

[0449] Following are ICAM, MAPK10, KIAA0861, NUMA1, GALE, DPF3 and LOC145197 amino acid sequences (SEQ ID NO: 18, 19, 20, 21, 22, 23, 24, 25, 26 and 27, respectively). Following is an ICAM1 cDNA sequence (SEQ ID NO: 18).

NP_000192 [gi: 4557878]
intercellular adhesion molecule 1 precursor;
CD54 [Homo sapiens]
MAPSSPRPALPALLVLLGALFPGPGNAQTSVSPSKVILPRGGSVLVTCST
SCDQPKLLGIETPLPKKELLLPGNNRKVYELSNVQEDSQPMCYSNCPDGQ
STAKTFLTVYWTPERVELAPLPSWQPVGKNLTLRCQVEGGAPRANLTVVL
LRGEKELKREPAVGEPAEVTTTVLVRRDHHGANFSCRTELDLRPQGLELF
ENTSAPYQLQTEVLPATPPQLVSPRVLEVDTQGTVVCSLDGLEPVSEAQV
HLALGDQRLNPTVTYGNDSPSAKASVSVTAEDEGTQRLTCAVILGNQSQE
TLQTVTIYSFPAPNVTLTKPEVSEGTEVTVKCEAHPRAKVTLNGVPAQPL
GPRAQLLLKATPEDNGRSFSCSATLEVAGQLIHKNQTRELRVLYGPRLDE
RDCPGNWTWPENSQQTPMCQAWGNPLPELKCLKDGTFPLPIGESVTVTRD
LEGTYLCRARSTQGEVTREVTVNVLSPRYEIVIITVVAAAVIMGTAGLST
YLYNRQRKIKKYRLQQAQKGTPMKPNTQATPP

[0450] Following is an ICAM4 amino acid sequence (SEQ ID NO: 19).

NP_001535 [gi:4504561] intercellular adhesion,
molecule 4 isoform 1 precursor; Landsteiner-
Wiener blood group protein [Homo sapiens].
MGSLFPLSLLEFLAAAYPGVGSALGRRTKRAQSPKGSPLAPSGTSVPFWV
RMSPEFVAVQPGKSVQLNCSNSCPQPQNSSLRTPLRQGKTLRGPGWVSYQ
LLDVRAWSSLAHGLVTCAGKTRWATSRITAYKPPHSVILEPPVLKGRKYT
LRCHVTQVFPVGYLVVTLRHGSRVIYSESLERFTGLDLANVTLTYEFAAG
PRDFWQPVICHARLNLDGLVVRNSSAPITLMLAWSPAPTALASGSIAALV
GTLLTVGAAYLCKCLAMKSQA

[0451] Following is an ICAM5 amino acid sequence (SEQ ID NO: 20).

NP_003250 [gi:12545404] intercellular adhesion
molecule 5 precursor; telencephalin [Homo sapiens]
MPGPSPGLRRALLGLWAALGLGLFGLSAVSQEPFWADLQPRVAFVERGGS
LWLNCSTNCPRPERGGLETSLRRNGTQRGLRWLARQLVDIREPETQPVCF
FRCARRTLQARGLTRTFQRPDRVELMPLPPWQPVGENFTLSCRVPGAGPR
ASLTLTLLRGAQELIRRSFAGEPPPARGAVLTATVLARREDHGANFSCRA
ELDLRPHGLGLFENSSAPRELRTFSLSPDAPRLAAPRLLEVGSERPVSCT
LDGLFPASEARVYLALGDQNLSPDVTLEGDAFVATATATASAEQEGARQL
ICNVTLGGENRETRENVTIYSFPAPLLTLSEPSVSEGQMVTVTCAAGTQA
LVTLEGVPAAVPGQPAQLQLNATENDDRRSFFCDATLDVDGETLIKNRSA
ELRVLYAPRLDDSDCPRSWTWPEGPEQTLRCEARGNPEPSVHCARSDGGA
VLALGLLGPVTRALSGTYRCKAANDQGEAVKDVTLTVEYAPALDSVGCPE
RITWLEGTEASLSCVAHGVPPPDVICVRSGELGAVIEGLLRVAREHAGTY
RCEATNPRGSAAKNVAVTVEYGPRFEEPSCPSNWTWVEGSGRLFSCEVDG
KPQPSVKCVGSGGATEGVLLPLAPPDPSPRAPRTPRVLAPGIYVCNATNR
HGSVAKTVVVSAESPPEMDESTCPSHQTWLEGAEASALACAARGRPSPGV
RCSREGIPWPEQQRVSREDAGTYHCVATNAHGTDSRTVTVGVHYRPVVAE
LAASPPGGVRPGGNFTLTCRAEAWPPAQISWRAPPGALNIGLSSNNSTLS
VAGAMGSHGGEYECARTNAHGRHARRITVRVAGPWLWVAVGGAAGGAALL
AAGAGLAFYVQSTACKKGEYNVQEAESSGEAVCLNGAGGGAGGAAGAEGG
PEAAGGAAESPAEGEVFAIQLTSA

[0452] Following is a MAPK10 amino acid sequence (SEQ ID NO: 21).

NP_002744 [gi:4506081] mitogen-activated protein
kinase 10 isoform 1; JNK3 alpha protein kinase;
stress activated protein kinase beta; MAP kinase;
c-Jun kinase 3; c-Jun N-terminal kinase 3; stress
activated protein kinase JNK3 [Homo sapiens]
MSLHPLYYCSEPTLDVKIAFCQGPDKQVDVSYTAKHYNMSKSKVDNQFYS
VEVGDSTFTVLKRYQNLKPIGSGAQGIVCAAYDAVLDRNVAIKKLSRPPQ
NQTHAKRAYRELVLMKCVNHKNIISLLNVFTPQKTLEEFQDVYLVMELMD
ANLCQVIQMELDHERMSYLLYQMLCGIKHLHSAGIIHRDLKPSNIVVKSD
CTLKILDFGLARTAGTSFMMTPYVVTRYYRAPEVILGMGYKENVDIWSVG
CIMGEMVRHKILFPGRDYTDQWNKVIEQLGTPCPEFMKKLQPTVRNYVEN
RPKYAGLTFPKLFPDSLFPADSEHNKLKASQARDLLSKMLVIDPAKRISV
DDALQHPYINVWYDPAEVEAPPPQIYDKQLDEREHTIEEWKELIYKEVMN
SEEKTKNGVVKGQPSPSAQVQQ
Additional isoforms are isoform 2 (NP_620448);
isoform 3 (NP_620446); isoform 4 (NP_620447)

[0453] Following is a first KIAA0861 amino acid sequence (SEQ ID NO: 22).

[0454] KIAA0861 Polypeptide Sequence Corresponding to SEQ ID NO: 3.

MTYLTSIPSVEAASIGEIVVIDRRRDKWSSVKASLTRTAVAFPGNLQLIF
ILRPSRFIQRTFTDIGIKYYRNEFKTKVPTIMVNSVSDLHGYIDKSQLTR
ELGGTLEYRHGQWVNHRTATENFALTLKTTAQMLQTFGSCLATAELPRSM
LSTEDLLMSHTRQRDKLQDELKLLGKQGTTLLSCIQEPATKCPNSKLNLN
QLENVTTMERLLVQLDETEKAFSHFWSEHHLKLNQCLQLQRFEHDFCKAK
LALDNLLEEQAEFTGTGDSVMHVEQILKEHKKLEEKSQESLEKAQLLALV
GDQLTQSHHYAADATRPRCVELRHLCDDFINGNKKKWDILGKSLEFHRQL
DKVSQWCEAGIYLLASQAVDKCQSREGVDTALNDIATFLGTVKEYPLLSP
KEFYNEFELLLTLDAKAKAQKVLQRLDDVQETFHKRQVSLMKLAAKQTRP
VQPVAPHPESSPKWVSSKTSQPSTSVPLARPLRTSEEPYTETELNSRGKE
DDETKFEVKSEEIFESHHERGNPELEQQARLGDLSPRRRIIRDLLETEEI
YIKEIKSIIDGYITPMDFTWLKHLIPDVLQNNKDFLFGNIRELYEFHNRT
FLKELEKCAENPELLAHCFLKRKEDLQIYFKYHKNLPRARAIWQECQDCA
YFGVCQRQLDHNLPLFKYLKGPSQRLIKYQMLLKGLLDFESPEDMEIDPG
ELGGSAKDGPKRTKDSAFSTELQQALAVIEDLIKSCELAVDLAAVTECPD
DIGKLGKLLLHGPFSVWTIHKDRYKMKDLIRFKPSQRQIYLFERGIVFCK
IRMEPGDQGLSPHYSFKKADKLMTLSIRQLGRGSHRKFEIASRNGLEKYI
LQAASKEIRDCWFSEISKLLMEQQNNIKDQGNPQFEMSTSKGSGAGSGPW
IKNMERATTSKEDPASSTGGIKGCSSREFSSMDTFEDCEGAEDMEKESSA
LSLAGLFQSDDSHETCSSKSAFLERGESSQGEKEERDEEETATRSTEEER
AGASTGRLAPAGATAGFQARALRPRTSAQES (1031 aa)

[0455] Following is a second KIAA0861 amino acid sequence (SEQ ID NO: 23).

NP_055893: KIAA0861
MLSCLKEEMPPQELTRRLATVITHVDEIMQQEVRPLMAVEIIEQLHRQFA
ILSGGRGEDGAPIITFPEFSGFKHIPDEDFLNVMTYLTSIPSVEAASIGF
IVVIDRRRDKWSSVKASLTRIAVAFPGNLQLIFILRPSRFIQRTFTDIGI
KYYRNEFKTKVPIIMVNSVSDLHGYTDKSQLTRELGGTLEYRHGQWVNHR
TATENFALTLKTTAQMLQTFGSCLATAELPRSMLSTEDLLMSHTRQRDKL
QDELKLLGKQGTTLLSCIQEPATKCPNSKLNLNQLENVTTMERLLVQLDE
TEKAFSHFWSEHHLKLNQCLQLQHPEHDFCKAKLALDNLLEEQAEFTGTG
DSVMHVEQILKEHKKLEEKSQEPLEKAQLLALVGDQLIQSHHYAADAIRP
RCVELRHLCDDFTNGNKKKWDILGKSLEFHRQLDKVSQWCEAGIYLLASQ
AVDKCQSREGVDIALNDIATFLGTVKEYPLLSPKEFYNEFELLLTLDAKA
KAQKVLQRLDDVQEIFHKRQVSLMKLAAKQTRPVQPVAPHPESSPKWVSS
KTSQPSTSVPLARPLRTSEEPYTETELNSRGKEDDETKFEVKSEEIFESH
HERGNPELEQQARLGDLSPRRRITRDLLETEEIYIKEIKSIIDGYITPMD
FIWLKHLIPDVLQNNKDFLFGNTRELYEFHNRTFLKELEKCAENPELLAH
CFLKRKEDLQIYFKYHKNLPRARAIWQECQDCAYFGVCQRQLDHNLPLFK
YLKGPSQRLIKYQMLLKGLLDFESPEDMEIDPGELGGSAKDGPKRTKDSA
FSTWLQQALAVIEDLIKSCELAVDLAAVTECPDDIGKLGKLLLHGPFSVW
TIHKDRYKMKDLIRFKPSQRQIYLFERGIVFCKIRMEPGDQGLSPHYSFK
KTMKLMTLSIRQLGRGSHRKFEIASRNGLEKYILQAASKEIRDCWFSETS
KLLMEQQNNIKDQGNPQFEMSTSKGSGAGSGPWIKNMERATTSKEDPASS
TGGIKGCSSREFSSMDTFEDCEGAEDMEKESSALSLAGLFQSDDSHETCS
SKSAFLERGESSQGEKEERDEEETATRSTEEERAGASTGRLAPAGATAGF
QARALRPRTSAQES (1114 aa)

[0456] Following is a NUMA1 amino acid sequence (SEQ ID NO: 24). NP₁₃006176 [gi: 5453820] nuclear mitotic appratus protien 1 [Homo Sapiens]

MTLHATRGAALLSWVNSLHVADPVEAVLQLQDCSTFIKIIDRIHGTEEGQ
QILKQPVSERLDFVCSFLQKNRKHPSSPECLVSAQKVLEGSELELAKMTM
LLLYHSTMSSKSPRDWEQFEYKIQAELAVILKFVLDHEDGLNLNEDLENF
LQKAPVPSTCSSTFPEELSPPSHQAKREIRFLELQKVASSSSGNNFLSGS
PASPMGDTLQTPQFQMRRLKKQLADERSNRDELELELAENRKLLTEKDAQ
IAMMQQRTDRLALLNEKQAASPLEPKELEELRDKNESLTMRLHETLKQCQ
DLKTEKSQMDRKTNQLSEENGDLSFKLREFASHLQQLQDALNELTEEHSK
ATQEWLEKQAQLEKELSAALQDKKCLEEKNEILQGKLSQLEEHLSQLQDN
PPQEKGEVLGDVLQLETLKQEAATLAANNTQLQARVEMLETERGQQEAKL
LAERGHFEEEKQQLSSLITDLQSSISNLSQAKEELEQASQAHGARLTAQV
ASLTSELTTLNATIQQQDQELAGLKQQAKEKQAQLAQTLQQQEQASQGLR
HQVEQLSSSLKQKEQQLKEVAEKQEATRQDHAQQLATAAEEREASLRERD
AALKQLEALEKEKAAKLEILQQQLQVANEARDSAQTSVTQAQREKAELSR
KVEELQACVETARQEQHEAQAQVAELELQLRSEQQKATEKERVAQEKDQL
QEQLQALKESLKVTKGSLEEEKRRAADALEEQQRCISELKAETRSLVEQH
KRERKELEEERAGRKGLEARLLQLGEAHQAETEVLRRELAEAMAAQHTAE
SECEQLVKEVAAWRDGYEDSQQEEAQYGAMFQEQLMTLKEECEKARQELQ
EAKEKVAGIESHSELQISRQQNKLAELHANLARALQQVQEKEVRAQKLAD
DLSTLQEKMAATSKEVARLETLVRKAGEQQETASRELVKEPARAGDRQPE
WLEEQQGRQFCSTQAALQANEREAEQMGNELERLRAALMESQGQQQEERG
QQEREVARLTQERGRAQADLALEKAARAELEMRLQNALNEQRVEFATLQE
ALAHALTEKEGKDQELAKLRGLEAAQIKELEELRQTVKQLKEQLAKKEKE
HASGSGAQSEAAGRTEPTGPKLEALRAEVSKLEQQCQKQQEQADSLERSL
EAERASRAERDSALETLQGQLEEKAQELGHSQSALASAQRELAAFRTKVQ
DHSKAEDEWKAQVARGRQEAERKNSLISSLEEEVSILNRQVLEKEGESKE
LKRLVMAESEKSQKLEESCACCRQRQPATVPELQNAALLCGRRCPASGRE
AEKQRVASEMLRQELTSQAERAEELGQELKAWQEKFFQKEQALSTLQLEH
TSTQALVSELLPAKHLCQQLQAEQAAAEKRHREELEQSKQAAGGLRAELL
PAQRELGELIPLRQKVAEQERTAQQLPAEKASYAEQLSMLKKAHGLLAEE
NRGLGERANLGRQFLEVELDQAREKYVQELAAVPADAETRLAEVQREAQS
TARELEVMTAKYEGAKVKVLEERQRFQEERQKLTAQVEELSKKLADSDQA
SKVQQQKLKAVQAQGGESQQEAQRFQAQLNELQAQLSQKEQAAEHYKLQM
EKAKTHYDAKKQQNQELQEQLRSLEQLQKENKELRAEAERLGHELQQAGL
KTKEAEQTCRHLTAQVRSLEAQVAHADQQLRDLGKFQVATDALKSREPQA
KPQLDLSIDSLDLSCEEGTPLSITSKLPRTQPDGTSVPGEPASPISQRLP
PKVESLESLYFTPIPARSQAPLESSLDSLGDVFLDSGRKTRSARRRTTQI
INITMTKKIDVEEPDSANSSFYSTRSAPASQASLRATSSTQSLARLGSPD
YGNSALLSLPGYRPTTRSSARRSQAGVSSGAPPGRNSFYMGTCQDEPEQL
DDWNRIAELQQRNRVCPPHLKTCYPLESRPSLSLGTITDEEMKTGDPQET
LRRASMQPIQIAEGTGITTRQQRKRVSLEPHQGPGTPESKKATSCFPRPM
TPRDRHEGRKQSTTEAQKKAAPASTKQADRRQSMAFSILNTPKKLGNSLL
RRGASKKALSKASPNTRSGTRRSPRIATTTASAATAAAIGATPRAKGKAK
H

[0457] Following is a GALE amino acid sequence (SEQ ID NO: 25).

MAEKVLVTGGAGYIGSHTVLELLEAGYLPVVIDNFHNAFRGGGSLPESLR
RVQELTGRSVEFEEMDILDQGALQRLFKKYSFMAVIHFAGLKAVGESVQK
PLDYYRVNLTGTIQLLEIMKAHGVKNLVFSSSATVYGNPQYLPLDEAHPT
GGCTNPYGKSKFFIEEMIRDLCQADKTWNVVLLRYFNPTGAHASGCIGED
PQGIPNNLMPYVSQVAIGRREALNVFGNDYDTEDGTGVRDYIHVVDLAKG
HIAALRKLKEQCGCRIYNLGTGTGYSVLQMVQAMEKASGKKIPYKVVARR
EGDVAACYANPSLAQEELGWTAALGLDRMCEDLWRWQKQNPSGFGTQA

[0458] Following is a DPF3 amino acid sequence (SEQ ID NO: 26).

NP_036206 [gi:13442998] cer-d4 (mouse) homolog;
2810403B03Rik [Homo sapiens].
MATVIHNPLKALGDQFYKEAIEHCRSYNSRLSAERSVRLPFLDSQTGVAQ
NNCYEWMEKRHRGPGLAPGQLYTYPARCWRKKRRLHPPEDPKLRLLEIKP
EVELPLKKDGFTSESTTLEALLRGEGVEKKVDAREEESIQEIQRVLENDE
NVEEGNEEEDLEEDIPKRKDRTRGRARCPLPSLHCFSSLPSAVIDAKEWG
GGGKWEATVAYRKKKIYPVHIFNM

[0459] Following is a LOC145197 amino acid sequence (SEQ ID NO: 27).

XP_096734.1 GI:18582779: hypothetical protein
XP_096734 [Homo sapiens]

MSFMLNTDLKCGSPHRLKLSFPQLYLRSMTTVTITGLVLLVRMWCYYIKA
LQVFIAIJVKQRPRNALQTLINVRSGPGSHFTNGNSDEKGRNEGFKAAPL

[0460] Modifications may be made to the foregoing without departing from the basic aspects of the invention. Although the invention has been described in substantial detail with reference to one or more specific embodiments, those of skill in the art will recognize that changes may be made to the embodiments specifically disclosed in this application, yet these modifications and improvements are within the scope and spirit of the invention, as set forth in the claims which follow. For example, polymorphic variants disclosed in an international patent application filed concurrently herewith, having attorney docket no. 524592007041, are applicable to embodiments described herein. Citation of the above publications or documents is not intended as an admission that any of the foregoing is pertinent prior art, nor does it constitute any admission as to the contents or date of these publications or documents. Each patent, patent application, document and publication referenced herein is hereby incorporated by reference in its entirety.

1. A method for identifying a subject at risk of breast cancer, which comprises detecting the presence or absence of a polymorphic variation associated with breast cancer corresponding to a position selected from the group consisting of rs5030391, rs10402760, rs710845, position 30965 of SEQ ID NO: 2, rs3775168, position 38865 of SEQ ID NO: 2, position 39035 of SEQ ID NO: 2, position 39046 of SEQ ID NO: 2, rs4630966, rs9827084, rs9864865, rs6804951, rs6770548, rs7949480, rs7121260, rs7128317, rs2276385, rs2276383, rs1892921, rs1541306, rs3814721, rs1892919, rs2852365, rs3750913, position 34941 in SEQ ID NO: 4, rs949325, position 35629 in SEQ ID NO: 4, rs2298456, rs1573500, rs4945411, rs10128658, rs2298457, rs3838779, rs10898814, rs7930142, rs7930544, rs7930722, rs1939247, rs1939243, rs4245463, rs4944258, rs7926751, rs1573502, rs7127865, rs1894003, rs4945430, rs1939242, rs10793016, rs4945434, rs678193, rs560777, rs676721, rs585228, rs675185, rs5792574, rs2511075, rs541022, rs1791544, rs642618, rs552966, rs607446, rs3018302, rs3018301, rs2511114, rs548961, rs579320, rs495567, rs493065, rs610004, rs610041, rs673478, rs670802, rs2511116, rs615000, rs482013, rs2511079, rs2250866, rs2508858, rs2276396, rs11278712, rs2294495, position 15761 of SEQ ID NO: 5, rs8179467, rs11591202, rs12034848, rs3831910, rs4237, rs2232982, rs12041159, rs2076343, rs1018396, rs12044452, rs2982390, rs2502980, rs6697805, rs10554242, rs3327, rs2526926, rs2526914, rs2526913, rs2526921, rs7159986, rs2332916, rs10132242, rs11627663, rs4899441, rs7148199, rs1990437, rs8004210, rs8019653, rs12232220, rs4899442, rs2332917, rs8015749, rs12437188, rs12432148, rs4378563, rs740978, rs740976, rs4903059, rs4903060, rs9635259, rs2052142, rs758913, rs747987, rs11423372, rs5809592, rs8007348, rs4899445, rs4903062, rs1990440, rs4479167, rs4606655, rs4606656, rs4489943, rs8007559, rs8006156, rs12431400, rs12431384, rs12433097, rs12433184, rs2877821, rs4569195, rs11628905, rs2191822, rs12433603, rs11448438, rs8009692, rs4265749, rs4307892, rs12431975, rs4903071, rs1860749, rs1860748, rs8010957, rs6420906, rs12434800, rs7142579, rs8010875, rs8004767, rs4899449, rs10605948, rs12437080, rs12431943, rs1054745, rs8019453, rs12431547, rs1959029, rs1959028, rs8013347, rs2235972, rs2235973, rs2235974, and rs2895908;
whereby the presence of the one or more polymorphic variations associated with breast cancer is indicative of the subject being at risk of breast cancer.

2. The method of claim 1, which further comprises obtaining the nucleic acid sample from the subject.

3. The method of claim 1, wherein a polymorphic variation is detected at one or more positions selected from the group consisting of rs5030391, rs10402760, and rs710845.

4. The method of claim 1, wherein a polymorphic variation is detected at one or more positions selected from the group consisting of position 30965 of SEQ ID NO: 2, rs3775168, position 38865 of SEQ ID NO: 2, position 39035 of SEQ ID NO: 2 and position 39046 of SEQ ID NO: 2.

5. The method of claim 1, wherein a polymorphic variation is detected at one or more positions selected from the group consisting of rs4630966, rs9827084, rs9864865, rs6804951 and rs6770548.

6. The method of claim 1, wherein a polymorphic variation is detected at one or more positions selected from the group consisting of rs7949480, rs7121260, rs7128317, rs2276385, rs2276383, rs1892921, rs1541306, rs3814721, rs1892919, rs2852365, rs3750913, position 34941 in SEQ ID NO: 4, rs949325, position 35629 in SEQ ID NO: 4, rs2298456, rs1573500, rs4945411, rs10128658, rs2298457, rs3838779, rs10898814, rs7930142, rs7930544, rs7930722, rs1939247, rs1939243, rs4245463, rs4944258, rs7926751, rs1573502, rs7127865, rs1894003, rs4945430, rs1939242, rs10793016, rs4945434, rs678193, rs560777, rs676721, rs585228, rs675185, rs5792574, rs2511075, rs541022, rs1791544, rs642618, rs552966, rs607446, rs3018302, rs3018301, rs2511114, rs548961, rs579320, rs495567, rs493065, rs610004, rs610041, rs673478, rs670802, rs2511116, rs615000, rs482013, rs2511079, rs2250866, rs2508858, rs2276396 and rs11278712.

7. The method of claim 1, wherein a polymorphic variation is detected at one or more positions selected from the group consisting of rs2294495, position 15761 of SEQ ID NO: 5, rs8179467, rs11591202, rs12034848, rs3831910, rs4237, rs2232982, rs12041159, rs2076343, rs018396, rs12044452, rs2982390, rs2502980, rs6697805 and rs10554242.

8. The method of claim 1, wherein a polymorphic variation is detected at one or more positions selected from the group consisting of rs3327, rs2526926, rs2526914, rs2526913, rs2526921, rs7159986, rs2332916, rs0132242, rs11627663, rs4899441, rs7148199, rs1990437, rs8004210, rs8019653, rs12232220, rs4899442, rs2332917, rs8015749, rs12437188, rs12432148, rs4378563, rs740978, rs740976, rs4903059, rs4903060, rs9635259, rs2052142, rs758913, rs747987, rs11423372, rs5809592, rs8007348, rs4899445, rs4903062, rs1990440, rs4479167, rs4606655, rs4606656, rs4489943, rs8007559, rs8006156, rs12431400, rs12431384, rs12433097, rs12433184, rs2877821, rs4569195, rs11628905, rs2191822, rs12433603, rs11448438, rs8009692, rs4265749, rs4307892, rs12431975, rs4903071, rs1860749, rs1860748, rs8010957, rs6420906, rs12434800, rs7142579, rs8010875, rs8004767, rs4899449, and rs10605948.

9. The method of claim 1, wherein a polymorphic variation is detected at one or more positions selected from the group consisting of rs12437080, rs12431943, rs1054745, rs8019453, rs12431547, rs1959029, rs1959028, rs8013347, rs2235972, rs2235973, rs2235974 and rs2895908.

10. The method of claim 1, wherein one or more polymorphic variations are detected at one or more positions in linkage disequilibrium with a polymorphic variation at one or more of the positions in claim 1.

11. The method of claim 1, wherein detecting the presence or absence of the one or more polymorphic variations comprises:
hybridizing an oligonucleotide to the nucleic acid sample, wherein the oligonucleotide is complementary to a nucleotide sequence in the nucleic acid and hybridizes to a region adjacent to the polymorphic variation;
extending the oligonucleotide in the presence of one or more nucleotides, yielding extension products; and
detecting the presence or absence of a polymorphic variation in the extension products.

12. The method of claim 1, wherein the subject is a human.

13. A method for identifying a polymorphic variation associated with breast cancer proximal to an incident polymorphic variation associated with breast cancer, which comprises:
identifying a polymorphic variation proximal to the incident polymorphic variation associated with breast cancer, wherein the incident polymorphic variation is at a position corresponding to a position selected from the group consisting of rs5030391, rs10402760, rs710845, position 30965 of SEQ ID NO: 2, rs3775168, position 38865 of SEQ ID NO: 2, position 39035 of SEQ ID NO: 2, position 39046 of SEQ ID NO: 2, rs4630966, rs9827084, rs9864865, rs6804951, rs6770548, rs7949480, rs7121260, rs7128317, rs2276385, rs2276383, rs1892921, rs1541306, rs3814721, rs1892919, rs2852365, rs3750913, position 34941 in SEQ ID NO: 4, rs949325, position 35629 in SEQ ID NO: 4, rs2298456, rs1573500, rs4945411, rs10128658, rs2298457, rs3838779, rs10898814, rs7930142, rs7930544, rs7930722, rs1939247, rs1939243, rs4245463, rs4944258, rs7926751, rs1573502, rs7127865, rs1894003, rs4945430, rs1939242, rs10793016, rs4945434, rs678193, rs560777, rs676721, rs585228, rs675185, rs5792574, rs2511075, rs541022, rs1791544, rs642618, rs552966, rs607446, rs3018302, rs3018301, rs2511114, rs548961, rs579320, rs495567, rs493065, rs610004, rs610041, rs673478, rs670802, rs2511116, rs615000, rs482013, rs2511079, rs2250866, rs2508858, rs2276396, rs11278712, rs2294495, position 15761 of SEQ ID NO: 5, rs8179467, rs11591202, rs12034848, rs3831910, rs4237, rs2232982, rs12041159, rs2076343, rs018396, rs12044452, rs2982390, rs2502980, rs6697805, rs10554242, rs3327, rs2526926, rs2526914, rs2526913, rs2526921, rs7159986, rs2332916, rs0132242, rs11627663, rs4899441, rs7148199, rs1990437, rs8004210, rs8019653, rs12232220, rs4899442, rs2332917, rs8015749, rs12437188, rs12432148, rs4378563, rs740978, rs740976, rs4903059, rs4903060, rs9635259, rs2052142, rs758913, rs747987, rs11423372, rs5809592, rs8007348, rs4899445, rs4903062, rs1990440, rs4479167, rs4606655, rs4606656, rs4489943, rs8007559, rs8006156, rs12431400, rs12431384, rs12433097, rs12433184, rs2877821, rs4569195, rs11628905, rs2191822, rs12433603, rs11448438, rs8009692, rs4265749, rs4307892, rs12431975, rs4903071, rs1860749, rs1860748, rs8010957, rs6420906, rs12434800, rs7142579, rs8010875, rs8004767, rs4899449, rs10605948, rs12437080, rs12431943, rs1054745, rs8019453, rs12431547, rs1959029, rs1959028, rs8013347, rs2235972, rs2235973, rs2235974, and rs2895908; and
determining the presence or absence of an association of the proximal polymorphic variant with breast cancer.

14. The method of claim 13, wherein the proximal polymorphic variation is within a region between about 5 kb 5′ of the incident polymorphic variation and about 5 kb 3′ of the incident polymorphic variation.

15. The method of claim 13, which further comprises determining whether the proximal polymorphic variation is at a position in linkage disequilibrium with the incident polymorphic variation.

16. The method of claim 13, which further comprises identifying a second polymorphic variation proximal to the identified proximal polymorphic variation associated with breast cancer and determining if the second proximal polymorphic variation is associated with breast cancer.

17. The method of claim 16, wherein the second proximal polymorphic variant is within a region between about 5 kb 5′ of the incident polymorphic variation and about 5 kb 3′ of the proximal polymorphic variation associated with breast cancer.

18. An isolated nucleic acid which comprises one or more polymorphic variations corresponding to a variation selected from the group consisting of a thymine at position 45003 of SEQ ID NO: 1, an adenine at position 47504 of SEQ ID NO: 1, an adenine at position 30965 of SEQ ID NO: 2, a cytosine at position 38865 of SEQ ID NO: 2, a thymine at position 39035 of SEQ ID NO: 2, a cytosine at position 39046 of SEQ ID NO: 2, a cytosine at position 34941 in SEQ ID NO: 4, a guanine at position 35629 in SEQ ID NO: 4 and an adenine at position 15761 of SEQ ID NO: 5.

19. An oligonucleotide comprising a nucleotide sequence complementary to a portion of the nucleotide sequence of claim 18, wherein the 3′ end of the oligonucleotide is adjacent to a polymorphic variation.

20. A microarray comprising an isolated nucleic acid of claim 18 linked to a solid support.

21. A method of genotyping a nucleic acid which comprises determining the nucleotide at one or more positions corresponding to a position selected from the group consisting of position 45003 of SEQ ID NO: 1, position 47504 of SEQ ID NO: 1, position 30965 of SEQ ID NO: 2, position 38865 of SEQ ID NO: 2, position 39035 of SEQ ID NO: 2, position 39046 of SEQ ID NO: 2, position 34941 in SEQ ID NO: 4, position 35629 in SEQ ID NO: 4 and position 15761 of SEQ ID NO: 5 in a nucleic acid.

22. A method for identifying a candidate molecule that modulates cell proliferation, which comprises:
(a) introducing a test molecule to a system which comprises a nucleic acid comprising a nucleotide sequence selected from the group consisting of:
(i) a nucleotide sequence in SEQ ID NO: 1-17;
(ii) a nucleotide sequence which encodes a polypeptide encoded by a nucleotide sequence in SEQ ID NO: 1-17;
(iii) a nucleotide sequence which encodes a polypeptide that is 90% or more identical to the amino acid sequence encoded by a nucleotide sequence in SEQ ID NO: 1-17;
(iv) a fragment of a nucleotide sequence of (i), (ii), or (iii); wherein the nucleotide sequence comprises a polymorphic variation associated with an increased risk of breast cancer corresponding to a position selected from the group consisting of rs5030391, rs10402760, rs710845, position 30965 of SEQ ID NO: 2, rs3775168, position 38865 of SEQ ID NO: 2, position 39035 of SEQ ID NO: 2, position 39046 of SEQ ID NO: 2, rs4630966, rs9827084, rs9864865, rs6804951, rs6770548, rs7949480, rs7121260, rs7128317, rs2276385, rs2276383, rs1892921, rs1541306, rs3814721, rs1892919, rs2852365, rs3750913, position 34941 in SEQ ID NO: 4, rs949325, position 35629 in SEQ ID NO: 4, rs2298456, rs1573500, rs4945411, rs10128658, rs2298457, rs3838779, rs10898814, rs7930142, rs7930544, rs7930722, rs1939247, rs1939243, rs4245463, rs4944258, rs7926751, rs1573502, rs7127865, rs1894003, rs4945430, rs1939242, rs10793016, rs4945434, rs678193, rs560777, rs676721, rs585228, rs675185, rs5792574, rs2511075, rs541022, rs1791544, rs642618, rs552966, rs607446, rs3018302, rs3018301, rs2511114, rs548961, rs579320, rs495567, rs493065, rs610004, rs610041, rs673478, rs670802, rs2511116, rs615000, rs482013, rs2511079, rs2250866, rs2508858, rs2276396, rs11278712, rs2294495, position 15761 of SEQ ID NO: 5, rs8179467, rs11591202, rs12034848, rs3831910, rs4237, rs2232982, rs12041159, rs2076343, rs1018396, rs12044452, rs2982390, rs2502980, rs6697805, rs10554242, rs3327, rs2526926, rs2526914, rs2526913, rs2526921, rs7159986, rs2332916, rs10132242, rs11627663, rs4899441, rs7148199, rs1990437, rs8004210, rs8019653, rs12232220, rs4899442, rs2332917, rs8015749, rs12437188, rs12432148, rs4378563, rs740978, rs740976, rs4903059, rs4903060, rs9635259, rs2052142, rs758913, rs747987, rs11423372, rs5809592, rs8007348, rs4899445, rs4903062, rs1990440, rs4479167, rs4606655, rs4606656, rs4489943, rs8007559, rs8006156, rs12431400, rs12431384, rs12433097, rs12433184, rs2877821, rs4569195, rs11628905, rs2191822, rs12433603, rs11448438, rs8009692, rs4265749, rs4307892, rs12431975, rs4903071, rs1860749, rs1860748, rs8010957, rs6420906, rs12434800, rs7142579, rs8010875, rs8004767, rs4899449, rs10605948, rs12437080, rs12431943, rs1054745, rs8019453, rs12431547, rs1959029, rs1959028, rs8013347, rs2235972, rs2235973, rs2235974, and rs2895908; or
introducing a test molecule to a system which comprises a protein encoded by a nucleotide sequence of (i), (ii), (iii), or (iv) and comprises a polymorphic variation associated with an increased risk of breast cancer; and
(b) determining the presence or absence of an interaction between the test molecule and the nucleic acid or protein,
whereby the presence of an interaction between the test molecule and the nucleic acid or protein identifies the test molecule as a candidate molecule that modulates cell proliferation.

23. The method of claim 22, wherein the system is an animal.

24. The method of claim 22, wherein the system is a cell.

25. A method for treating breast cancer in a subject, which comprises administering a candidate molecule identified by the method of claim 22 to a subject in need thereof, whereby the candidate molecule treats breast cancer in the subject.

26. A method for identifying a candidate therapeutic for treating breast cancer, which comprises:
(a) introducing a test molecule to a system which comprises a nucleic acid comprising a nucleotide sequence selected from the group consisting of:
(i) a nucleotide sequence in SEQ ID NO: 1-17;
(ii) a nucleotide sequence which encodes a polypeptide encoded by a nucleotide sequence in SEQ ID NO: 1-17;
(iii) a nucleotide sequence which encodes a polypeptide that is 90% or more identical to the amino acid sequence encoded by a nucleotide sequence in SEQ ID NO: 1-17;
(iv) a fragment of a nucleotide sequence of (i), (ii), or (iii); wherein the nucleotide sequence comprises a polymorphic variation associated with an increased risk of breast cancer corresponding to a position selected from the group consisting of rs5030391, rs10402760, rs710845, position 30965 of SEQ ID NO: 2, rs3775168, position 38865 of SEQ ID NO: 2, position 39035 of SEQ ID NO: 2, position 39046 of SEQ ID NO: 2, rs4630966, rs9827084, rs9864865, rs6804951, rs6770548, rs7949480, rs7121260, rs7128317, rs2276385, rs2276383, rs1892921, rs1541306, rs3814721, rs1892919, rs2852365, rs3750913, position 34941 in SEQ ID NO: 4, rs949325, position 35629 in SEQ ID NO: 4, rs2298456, rs1573500, rs4945411, rs10128658, rs2298457, rs3838779, rs10898814, rs7930142, rs7930544, rs7930722, rs1939247, rs1939243, rs4245463, rs4944258, rs7926751, rs1573502, rs7127865, rs1894003, rs4945430, rs1939242, rs10793016, rs4945434, rs678193, rs560777, rs676721, rs585228, rs675185, rs5792574, rs2511075, rs541022, rs1791544, rs642618, rs552966, rs607446, rs3018302, rs3018301, rs2511114, rs548961, rs579320, rs495567, rs493065, rs610004, rs610041, rs673478, rs670802, rs2511116, rs615000, rs482013, rs2511079, rs2250866, rs2508858, rs2276396, rs11278712, rs2294495, position 15761 of SEQ ID NO: 5, rs8179467, rs11591202, rs12034848, rs3831910, rs4237, rs2232982, rs12041159, rs2076343, rs1018396, rs12044452, rs2982390, rs2502980, rs6697805, rs10554242, rs3327, rs2526926, rs2526914, rs2526913, rs2526921, rs7159986, rs2332916, rs10132242, rs11627663, rs4899441, rs7148199, rs1990437, rs8004210, rs8019653, rs12232220, rs4899442, rs2332917, rs8015749, rs12437188, rs12432148, rs4378563, rs740978, rs740976, rs4903059, rs4903060, rs9635259, rs2052142, rs758913, rs747987, rs11423372, rs5809592, rs8007348, rs4899445, rs4903062, rs1990440, rs4479167, rs4606655, rs4606656, rs4489943, rs8007559, rs8006156, rs12431400, rs12431384, rs12433097, rs12433184, rs2877821, rs4569195, rs11628905, rs2191822, rs12433603, rs11448438, rs8009692, rs4265749, rs4307892, rs12431975, rs4903071, rs1860749, rs1860748, rs8010957, rs6420906, rs12434800, rs7142579, rs8010875, rs8004767, rs4899449, rs10605948, rs12437080, rs12431943, rs1054745, rs8019453, rs12431547, rs1959029, rs1959028, rs8013347, rs2235972, rs2235973, rs2235974, and rs2895908; or
introducing a test molecule to a system which comprises a protein encoded by a nucleotide sequence of (i), (ii), (iii), or (iv) and comprises a polymorphic variation associated with an increased risk of breat cancer; and
(b) determining the presence or absence of an interaction between the test molecule and the nucleic acid or protein,
whereby the presence of an interaction between the test molecule and the nucleic acid or protein identifies the test molecule as a candidate therapeutic for treating breast cancer.

27. The method of claim 26, wherein the test molecule inhibits cell proliferation or cell metastasis.

28. A method for treating breast cancer in a subject, which comprises contacting one or more cells of a subject in need thereof with a nucleic acid, wherein the nucleic acid comprises a nucleotide sequence selected from the group consisting of:
(a) a nucleotide sequence in SEQ ID NO: 1-17;
(b) a nucleotide sequence which encodes a polypeptide encoded by a nucleotide sequence in SEQ ID NO: 1-17;
(c) a nucleotide sequence which encodes a polypeptide that is 90% or more identical to the amino acid sequence encoded by a nucleotide sequence in SEQ ID NO: 1-17;
(d) a fragment of a nucleotide sequence of (a), (b), or (c); and
(e) a nucleotide sequence complementary to the nucleotide sequences of (a), (b), (c), or (d);
wherein the nucleotide sequence comprises a polymorphic variation associated with an increased risk of breast cancer corresponding to a position selected from the group consisting of rs5030391, rs10402760, rs710845, position 30965 of SEQ ID NO: 2, rs3775168, position 38865 of SEQ ID NO: 2, position 39035 of SEQ ID NO: 2, position 39046 of SEQ ID NO: 2, rs4630966, rs9827084, rs9864865, rs6804951, rs6770548, rs7949480, rs7121260, rs7128317, rs2276385, rs2276383, rs1892921, rs1541306, rs3814721, rs1892919, rs2852365, rs3750913, position 34941 in SEQ ID NO: 4, rs949325, position 35629 in SEQ ID NO: 4, rs2298456, rs1573500, rs4945411, rs10128658, rs2298457, rs3838779, rs10898814, rs7930142, rs7930544, rs7930722, rs1939247, rs1939243, rs4245463, rs4944258, rs7926751, rs1573502, rs7127865, rs1894003, rs4945430, rs1939242, rs10793016, rs4945434, rs678193, rs560777, rs676721, rs585228, rs675185, rs5792574, rs2511075, rs541022, rs1791544, rs642618, rs552966, rs607446, rs3018302, rs3018301, rs2511114, rs548961, rs579320, rs495567, rs493065, rs610004, rs610041, rs673478, rs670802, rs2511116, rs615000, rs482013, rs2511079, rs2250866, rs2508858, rs2276396, rs11278712, rs2294495, position 15761 of SEQ ID NO: 5, rs8179467, rs11591202, rs12034848, rs3831910, rs4237, rs2232982, rs12041159, rs2076343, rs1018396, rs12044452, rs2982390, rs2502980, rs6697805, rs10554242, rs3327, rs2526926, rs2526914, rs2526913, rs2526921, rs7159986, rs2332916, rs0132242, rs11627663, rs4899441, rs7148199, rs1990437, rs8004210, rs8019653, rs12232220, rs4899442, rs2332917, rs8015749, rs12437188, rs12432148, rs4378563, rs740978, rs740976, rs4903059, rs4903060, rs9635259, rs2052142, rs758913, rs747987, rs11423372, rs5809592, rs8007348, rs4899445, rs4903062, rs1990440, rs4479167, rs4606655, rs4606656, rs4489943, rs8007559, rs8006156, rs12431400, rs12431384, rs12433097, rs12433184, rs2877821, rs4569195, rs11628905, rs2191822, rs12433603, rs11448438, rs8009692, rs4265749, rs4307892, rs12431975, rs4903071, rs1860749, rs1860748, rs8010957, rs6420906, rs12434800, rs7142579, rs8010875, rs8004767, rs4899449, rs10605948, rs12437080, rs12431943, rs1054745, rs8019453, rs12431547, rs1959029, rs1959028, rs8013347, rs2235972, rs2235973, rs2235974, and rs2895908;
whereby contacting the one or more cells of the subject with the nucleic acid treats breast cancer in the subject.

29. The method of claim 28, wherein the nucleic acid is RNA or PNA.

30. The method of claim 29, wherein the nucleic acid is duplex RNA.

31. The method of claim 30, wherein a strand of the RNA comprises a nucleotide sequence selected from the group consisting of ACAACCGGAAGGUGUAUGA (SEQ ID NO: 4928); GCCAACCAAUGUGCUAUUC (SEQ ID NO: 4929); GAUCACCAUGGAGCCAAUU (SEQ ID NO: 4930; CUGUCACUCGAGAUCUUGA (SEQ ID NO: 4931); GAGUUGGAUAGCAAGACAA (SEQ ID NO: 4932) and CGUACGCGGAAUACUUCGA (SEQ ID NO: 4933.

32. A method for treating breast cancer in a subject, which comprises:
detecting the presence or absence of one or more polymorphic variations associated with breast cancer in a nucleic acid sample from a subject, wherein the one or more polymorphic variations are detected at a position corresponding to a position selected from the group consisting of rs5030391, rs10402760, rs710845, position 30965 of SEQ ID NO: 2, rs3775168, position 38865 of SEQ ID NO: 2, position 39035 of SEQ ID NO: 2, position 39046 of SEQ ID NO: 2, rs4630966, rs9827084, rs9864865, rs6804951, rs6770548, rs7949480, rs7121260, rs7128317, rs2276385, rs2276383, rs1892921, rs1541306, rs3814721, rs1892919, rs2852365, rs3750913, position 34941 in SEQ ID NO: 4, rs949325, position 35629 in SEQ ID NO: 4, rs2298456, rs1573500, rs4945411, rs10128658, rs2298457, rs3838779, rs10898814, rs7930142, rs7930544, rs7930722, rs1939247, rs1939243, rs4245463, rs4944258, rs7926751, rs1573502, rs7127865, rs1894003, rs4945430, rs1939242, rs10793016, rs4945434, rs678193, rs560777, rs676721, rs585228, rs675185, rs5792574, rs2511075, rs541022, rs1791544, rs642618, rs552966, rs607446, rs3018302, rs3018301, rs2511114, rs548961, rs579320, rs495567, rs493065, rs610004, rs610041, rs673478, rs670802, rs2511116, rs615000, rs482013, rs2511079, rs2250866, rs2508858, rs2276396, rs11278712, rs2294495, position 15761 of SEQ ID NO: 5, rs8179467, rs11591202, rs12034848, rs3831910, rs4237, rs2232982, rs12041159, rs2076343, rs1018396, rs12044452, rs2982390, rs2502980, rs6697805, rs10554242, rs3327, rs2526926, rs2526914, rs2526913, rs2526921, rs7159986, rs2332916, rs10132242, rs11627663, rs4899441, rs7148199, rs1990437, rs8004210, rs8019653, rs12232220, rs4899442, rs2332917, rs8015749, rs12437188, rs12432148, rs4378563, rs740978, rs740976, rs4903059, rs4903060, rs9635259, rs2052142, rs758913, rs747987, rs11423372, rs5809592, rs8007348, rs4899445, rs4903062, rs1990440, rs4479167, rs4606655, rs4606656, rs4489943, rs8007559, rs8006156, rs12431400, rs12431384, rs12433097, rs12433184, rs2877821, rs4569195, rs11628905, rs2191822, rs12433603, rs11448438, rs8009692, rs4265749, rs4307892, rs12431975, rs4903071, rs1860749, rs1860748, rs8010957, rs6420906, rs12434800, rs7142579, rs8010875, rs8004767, rs4899449, rs10605948, rs12437080, rs12431943, rs1054745, rs8019453, rs12431547, rs1959029, rs1959028, rs8013347, rs2235972, rs2235973, rs2235974, and rs2895908; and
administering a breast cancer treatment to a subject in need thereof based upon the presence or absence of the one or more polymorphic variations in the nucleic acid sample.

33. The method of claim 32, wherein the breast cancer treatment comprises a nucleic acid comprising a nucleotide sequence complementary to a nucleotide sequence in SEQ ID NO: 1-17.

34. The method of claim 33, wherein the nucleic acid is a double stranded RNA.

35. The method of claim 34, wherein a strand of the RNA comprises a nucleotide sequence selected from the group consisting of ACAACCGGAAGGUGUAUGA (SEQ ID NO: 4928); GCCAACCAAUGUGCUAUUC (SEQ ID NO: 4929); GAUCACCAUGGAGCCAAUU (SEQ ID NO: 4930); CUGUCACUCGAGAUCUUGA (SEQ ID NO: 4931); GAGUUGGAUAGCAAGACAA (SEQ ID NO: 4932) and CGUACGCGGAAUACUUCGA (SEQ ID NO: 4933).

36. The method of claim 32, which further comprises extracting and analyzing a tissue biopsy sample from the subject.

37. The method of claim 32, wherein the treatment is chemotherapy, surgery, radiation therapy, and combinations of the foregoing.

38. The method of claim 37, wherein the chemotherapy is selected from the group consisting of cyclophosphamide (Cytoxan), methotrexate (Amethopterin, Mexate, Folex), fluorouracil (Fluorouracil, 5-Fu, Adrucil), cyclophosphamide, doxorubicin (Adriamycin), and combinations of the foregoing.

39. The method of claim 38, wherein the combinations are selected from the group consisting of cyclophosphamide (Cytoxan), methotrexate (Amethopterin, Mexate, Folex), and fluorouracil (Fluorouracil, 5-Fu, Adrucil); cyclophosphamide, doxorubicin (Adriamycin), and fluorouracil; and doxorubicin and cyclophosphamide.

40. The method of claim 32, wherein the breast cancer treatment reduces breast cancer metastasis.

41. A method for detecting or preventing breast cancer in a subject, which comprises:
detecting the presence or absence of one or more polymorphic variations associated with breast cancer in a nucleic acid sample from a subject, wherein the polymorphic variation is detected at a position corresponding to a position selected from the group consisting of rs5030391, rs10402760, rs710845, position 30965 of SEQ ID NO: 2, rs3775168, position 38865 of SEQ ID NO:
position 39035 of SEQ ID NO: 2, position 39046 of SEQ ID NO: 2, rs4630966, rs9827084, rs9864865, rs6804951, rs6770548, rs7949480, rs7121260, rs7128317, rs2276385, rs2276383, rs1892921, rs1541306, rs3814721, rs1892919, rs2852365, rs3750913, position 34941 in SEQ ID NO:
rs949325, position 35629 in SEQ ID NO: 4, rs2298456, rs1573500, rs4945411, rs10128658, rs2298457, rs3838779, rs10898814, rs7930142, rs7930544, rs7930722, rs1939247, rs1939243, rs4245463, rs4944258, rs7926751, rs1573502, rs7127865, rs1894003, rs4945430, rs1939242, rs10793016, rs4945434, rs678193, rs560777, rs676721, rs585228, rs675185, rs5792574, rs2511075, rs541022, rs1791544, rs642618, rs552966, rs607446, rs3018302, rs3018301, rs2511114, rs548961, rs579320, rs495567, rs493065, rs610004, rs610041, rs673478, rs670802, rs2511116, rs615000, rs482013, rs2511079, rs2250866, rs2508858, rs2276396, rs11278712, rs2294495, position 15761 of SEQ ID NO: 5, rs8179467, rs11591202, rs12034848, rs3831910, rs4237, rs2232982, rs12041159, rs2076343, rs018396, rs12044452, rs2982390, rs2502980, rs6697805, rs10554242, rs3327, rs2526926, rs2526914, rs2526913, rs2526921, rs7159986, rs2332916, rs0132242, rs11627663, rs4899441, rs7148199, rs1990437, rs8004210, rs8019653, rs12232220, rs4899442, rs2332917, rs8015749, rs12437188, rs12432148, rs4378563, rs740978, rs740976, rs4903059, rs4903060, rs9635259, rs2052142, rs758913, rs747987, rs11423372, rs5809592, rs8007348, rs4899445, rs4903062, rs1990440, rs4479167, rs4606655, rs4606656, rs4489943, rs8007559, rs8006156, rs12431400, rs12431384, rs12433097, rs12433184, rs2877821, rs4569195, rs11628905, rs2191822, rs12433603, rs11448438, rs8009692, rs4265749, rs4307892, rs12431975, rs4903071, rs1860749, rs1860748, rs8010957, rs6420906, rs12434800, rs7142579, rs8010875, rs8004767, rs4899449, rs10605948, rs12437080, rs12431943, rs1054745, rs8019453, rs12431547, rs1959029, rs1959028, rs8013347, rs2235972, rs2235973, rs2235974, and rs2895908; and
administering a breast cancer prevention procedure or detection procedure to a subject in need thereof based upon the presence or absence of the one or more polymorphic variations in the nucleic acid sample.

42. The method of claim 41, wherein the breast cancer detection procedure is selected from the group consisting of a mammography, an early mammography program, a frequent mammography program, a biopsy procedure, a breast biopsy and biopsy from another tissue, a breast ultrasound and optionally ultrasound analysis of another tissue, breast magnetic resonance imaging (MRI) and optionally MRI analysis of another tissue, electrical impedance (T-scan) analysis of breast and optionally of another tissue, ductal lavage, nuclear medicine analysis (e.g., scintimammography), BRCA1 and/or BRCA2 sequence analysis results, thermal imaging of the breast and optionally of another tissue, and a combination of the foregoing.

43. The method of claim 41, wherein the breast cancer prevention procedure is selected from the group consisting of one or more selective hormone receptor modulators, one or more compositions that prevent production of hormones, one or more hormonal treatments, one or more biologic response modifiers, surgery, and drugs that delay or halt metastasis.

44. The method of claim 43, wherein the selective hormone receptor modulator is selected from the group consisting of tamoxifen, reloxifene, and toremifene; the composition that prevents production of hormones is an aramotase inhibitor selected from the group consisting of exemestane, letrozole, anastrozol, groserelin, and megestrol; the hormonal treatment is selected from the group consisting of goserelin acetate and fulvestrant; the biologic response modifier is an antibody that specifically binds herceptin/HER2; the surgery is selected from the group consisting of lumpectomy and mastectomy; and the drug that delays or halts metastasis is pamidronate disodium.

45. A composition comprising a breast cancer cell and an antibody that specifically binds to a protein, polypeptide or peptide encoded by a nucleotide sequence identical to or 90% or more identical to a nucleotide sequence in SEQ ID NO: 1-17, wherein the protein, polypeptide or peptide comprises a leucine corresponding to the amino acid at position 359 in SEQ ID NO: 23, a leucine corresponding to the amino acid at position 378 in SEQ ID NO: 23, an alanine corresponding to the amino acid at position 857 in SEQ ID NO: 23, an alanine corresponding to the amino acid at position 902 in SEQ ID NO: 23, a proline corresponding to the amino acid at position 352 in SEQ ID NO: 20, an alanine corresponding to the amino acid at position 348 in SEQ ID NO: 20 or a glycine corresponding to the amino acid at position 794 in SEQ ID NO: 24.

46. A composition comprising a breast cancer cell and a RNA, DNA, PNA or ribozyme molecule comprising a nucleotide sequence identical to or 90% or more identical to a portion of a nucleotide sequence in SEQ ID NO: 1-17, or a complementary sequence thereof, wherein the nucleotide sequence comprises a polymorphic variation associated with an increased risk of breast cancer corresponding to a position selected from the group consisting of group consisting of rs5030391, rs10402760, rs710845, position 30965 of SEQ ID NO: 2, rs3775168, position 38865 of SEQ ID NO: 2, position 39035 of SEQ ID NO: 2, position 39046 of SEQ ID NO: 2, rs4630966, rs9827084, rs9864865, rs6804951, rs6770548, rs7949480, rs7121260, rs7128317, rs2276385, rs2276383, rs1892921, rs1541306, rs3814721, rs1892919, rs2852365, rs3750913, position 34941 in SEQ ID NO: 4, rs949325, position 35629 in SEQ ID NO: 4, rs2298456, rs1573500, rs4945411, rs10128658, rs2298457, rs3838779, rs10898814, rs7930142, rs7930544, rs7930722, rs1939247, rs1939243, rs4245463, rs4944258, rs7926751, rs1573502, rs7127865, rs1894003, rs4945430, rs1939242, rs10793016, rs4945434, rs678193, rs560777, rs676721, rs585228, rs675185, rs5792574, rs2511075, rs541022, rs1791544, rs642618, rs552966, rs607446, rs3018302, rs3018301, rs2511114, rs548961, rs579320, rs495567, rs493065, rs610004, rs610041, rs673478, rs670802, rs2511116, rs615000, rs482013, rs2511079, rs2250866, rs2508858, rs2276396, rs11278712, rs2294495, position 15761 of SEQ ID NO: 5, rs8179467, rs11591202, rs12034848, rs3831910, rs4237, rs2232982, rs12041159, rs2076343, rs1018396, rs12044452, rs2982390, rs2502980, rs6697805, rs10554242, rs3327, rs2526926, rs2526914, rs2526913, rs2526921, rs7159986, rs2332916, rs10132242, rs11627663, rs4899441, rs7148199, rs1990437, rs8004210, rs8019653, rs12232220, rs4899442, rs2332917, rs8015749, rs12437188, rs12432148, rs4378563, rs740978, rs740976, rs4903059, rs4903060, rs9635259, rs2052142, rs758913, rs747987, rs11423372, rs5809592, rs8007348, rs4899445, rs4903062, rs1990440, rs4479167, rs4606655, rs4606656, rs4489943, rs8007559, rs8006156, rs12431400, rs12431384, rs12433097, rs12433184, rs2877821, rs4569195, rs11628905, rs2191822, rs12433603, rs11448438, rs8009692, rs4265749, rs4307892, rs12431975, rs4903071, rs1860749, rs1860748, rs8010957, rs6420906, rs12434800, rs7142579, rs8010875, rs8004767, rs4899449, rs10605948, rs12437080, rs12431943, rs1054745, rs8019453, rs12431547, rs1959029, rs1959028, rs8013347, rs2235972, rs2235973, rs2235974, and rs2895908.

47. The composition of claim 46, wherein the RNA molecule is a short inhibitory RNA molecule.

The application's sequence listing, which the Patent Office published only in electronic form, follows.

SEQUENCE LISTING (4962 sequences)

SEQ ID NO: 1 - DNA, 92600 bp, Homo sapiens
  misc_feature (22393)..(22394): n is a, c, g, or t
  misc_feature (24675)..(24676): n is a, c, g, or t
  misc_feature (31942)..(31942): n is a, c, g, or t
  misc_feature (32965)..(32966): n is a, c, g, or t
  misc_feature (33724)..(33724): n is a, c, g, or t
aggaggctgaggtgggagaatggcgtgaacctgggaggcggagcttgcagtgagccaagatcacgccactgcactccagcctgggcgacagagcgagactccgtctcaaaaaaaaaaaaaaaaaaaaaaaagccaggcgaggtgactcacacccataatcgcagcactttgggaggccaaggcgggcagatcgcttgagcccagaagtttgagatctgcctgggcaacayggcgagaccctgtctctatgaaacaagaaaaaagaaagaaacgaaatactgttccatcatttgccacataaaatctaaactctctggtgcagaacagacttgcaaatctgcctgtaaaatcatacaccggattttggagtagacacacaggaggctgattgtagtggtggcttctgggagaagaactggggggtagggggcacagataagagtagacagaattttcactctagtaatctttgtaatttttgaaattctctctaccaggtgtatgaatgaccaatgaaaatatacaataggccaggcgcagtggctcacgcctataatcccagcactttgggaggctgaggcgggtggatcacatgaggtcaggagtccgaggccagcctgaccaacatggtgaaaccttgtctctacgaaaaatacaaacattagtcaggtagggagcatcacttgagaacaggagttcaagaccagcctggacaacaaagcaagacctctgcctctacaaaaaaaaaaaaaaaaaaaaaaaattgctgggcatggtggaacatgcctgtggcctcagctacttaggtggctgcagcagaggatcatctgaggccaggaattcaagactacagtgaactataatcgttacactgcactacagactggtaacagggtgagatcctgtctcaaaaacaacagcaacaaaataaacgattaaaagaccttttaaagttgcaaaatacatagagtcttaaacatgcatccacagttatttatttatttatttagaaacggagtttcactcttgttgcccaggctggagtgcaatggtgcggtatcagctcactgcaacctccgcctcccaagttaaaggaattctgcctcagccttccaagtagctggaattacaggcatgcgccaccatgctcggctaattttgtatttttagtaaagatggggttttggcatattggccaggatggtttcgaacccctgacctcaggtgatccacccgcctcggactcccaaagtgctaggattataggcatgagccaccacgcccggccgcattcagttattcttgcagggataaaatacacaatgaaatacactatactttttgttttctttctttcttttttttttttttttttgagacagagtctcactcgtcgcatgggctggagtgcggtgcgggatctcggctcactgcaacctctgcctcctgggttgaagcgattctcctgcgtcagcctcccgagtagctgggattacaggtgcccgccactacgcccagctaatttttttgtatttttagtagagataaggtttcaccatgttggccaggctggtctcgaactcctgactcgtgattcgcccaccttggcctcccaaagtgctgggattacaggcgtgagccaccgcacccggccacatttttttttttttttttttgagacaggatcttagtctgtcacccaggctggagtacagtggcatgaacatggctcactgcagcctcaatctcttgggttcaggtgatccttctgccttagcctccccattagctgggaccacaggcatataccatcacacctagctaatttttaaatttttggtagaggccaggcgcggtggctcacgcctgtaatcccagcactttgggaggccgagtcgggtggatcacctgaggtcgggagttcgagaccagcctggccaaaatggtgaaaccctgtctctactaaaaataaaaaataaaaataaaaattagctgggcgtagtggcgggcgcctgtaatcccagctactcgggaggctgaggcaggagaatcgcttgaacccaggaggcagaggttgcagtgagccaagatcgcgctactgcactccagcctgggcaacagagtgagattctgtctcaaaaaaaaaataataataatgctatttattgactttacaccttgtaccaggcatgggaagctttgcctccattacgtcactgaatctcataacctccttttccagcagaggaaaatgaggttggttcacagaccacgttgtcagctgtgctctgtccagaacgcactggcctccaagtagacagccctggactggtagggaagccggctatgatccggtggcgccccctggaggtctatcgggaacatggtaaagaacctaaaaatgggtgggccacagtagctcatgcctgtaatcccagcactttgggggaccaatgcgggagaattgcttgagcccaggagttcaagaccagcctgggcaacattgggagacccaccccccgccatctctacaaaaaaaaaattaggccgggcgcggtggctcaggcctgtaatcccagcactttgggaggccgaggcgggtggatcacctgaggtcaggagttcaagaccagcctggccaacgtggtgccacactgtctctaataaaaacacgaaaattagggccgggctcggtggctcacgcctgtaatcccagcactttgggaagccgaggcgggcggatcacgaggtcaggagattgagaccatcctggctaacacggtgaaaccccctctctactaaaaatacaaaaagttagccaggtgtggtggcgggcgcctgtagtcccagctactcggtaagctgaggcagggaatcgcttgaacccgggaggccgagatgtgcgatctcacaccactgcactccggcctgggcgacagagcgatactccatctcaaaatacaaatacaaaataaaaaaatacaatacaaaaatgagccgggcttgcgtacctgtagaccagctactcaggagacagaggcaggagaatcccttgagctctggaggtcgaggctgcagtaagccatgatcttgcccattgcactccagcctgggcgacagaggaagaccttgtctctaaaaaccaaaacaaagaaactaaaaataagcattcggatttgttagggggcgacaagggaggcactccaggatctgtggactccccactttgttctgtccttggagagccctggaaggtctgagaggggacgggacctggtttaagggggtaggggagaggaccctggtctagggggtaagggacacaaatacctaatctgaggggtttcggggggacatggccctgccctggggaatctaaactgggaggcatggtctggcaggcccaatcctgaaggctttctgagggcaataaggccctgcctttaaacaaatgaaaaaacgccaggcacggtggctcacgcctgtaatcccagcactttggaaggctgaggcgggaggatcacgaggtcaggagatcgagaccatcctggctaacgcggtgatacccgtctctactaaaaatacaaaaaattagccaggcgtggtggcgggcgcctgcagtcccagctactcgggaggctgaggcaggagaatggcgtgaacccaggaggcggagcttgcagtgagccgagatcgcgccactgcactccagcctgggcaacagagcaagactccgtctcaaaaaaaacaaaaacaaaaacaaaaacaaaaacaaaaaaacaaataaaaaaacaaaaccacataactggataaagaaaaaaccatctccgacagccttggaggcgggatgaaggcgtggcccggtgggcgtgaccaacagcaaaagtttaagcgttattggctgtattccttagttgctcactccagaactgcccacttatgggcgggggtcactccttcaggcttaacagtcattggctgaattgggccagagaggtctcattggctgaattcctgcaccggctcgtcggaggcgggacccaaagtaggctaggcctacggaagctgggtcttcttgctgtgaggtcgcgttccccagtgttacggagggtccttgaggcaggagtgaaaattgggtctgggggttagtcctggggtggaggtctgggcacgccgggtcggaccccctccatcttcggttttgcacaccccgctttccagcgcggagtcgcggcgggtagggcggcgtcgcgtgcgtgacgtcatccagcggcgcctcgcraggctccagtggccttgacctcccgcggcgtgggaggctgcgcggcgatgctgcagttcgtccgggccggggcgcgggcctggcttcggcctaccggcagccaggtgaggccaggggctggaggcgtggtcgaaggatgaaatttgggggtgtccaggggtcgtctctcactttcgcccaacccttgcagggcctgagttccctggcggaagaggcagcgcgtgcgaccgagaacccggagcaggtggcgagcgagggtaaggcaaccggggtggctccaggaggggcggcgacagagaggtctgacccttgaccctaacctctgacccccgcaatcgctccaggtctcccggagcccgtgctgcgcaaagtcgagctcccggtacccactcatcgacgcccagtgcaggcctgggtcgagtccttgcggggcttcgagcaggagcgcgtgggcctggccgacctgcaccccgatgttttcgccaccgcgcccaggtgagcgagggctgtaatggtgaactgagtggcagagggatgaagagcgggatttcaggagtcacgatgactttgggcttgtacccttgggaaagtgctgtatttctacagcctccgtttctccacctgtcaaaggggaatgatgacagtttcccctgctgtagcgctgtgtgagattgaagcctgagaggtgacatcatctaagggttagggagacagaattctggagcccgactgattaggttcaaatcctgccttcccctcttgtccctcagtgtccctattttgtcagcggtcgggaggttgctgtgatgaataaatgacttaattctggcacataataagttctatagaaatgttgataatctttgttaactggtttttgcaaataagagcactaaaaagactaaaccattcctcggtgcctggaagaggctgtttgcattttagttaccctgctgttcataacatctctaagaaaatgtaggggccaccctgggcgcagtggctcacgcctgtaatcccagcactttgggaggccaaggcgggcggatcacgaggtcaggagatcgagaccatcctggctaacatggtgaaaccccgtctctactaaaaatacaaaaaaaaattagccgggcgtggtggcgggcgtctgtagtcccaggtactctggaggctgaggcaagagaatggcgtgaacccgggaggcggagcttgcagtgagccgagatcgcgccactgcactccatcctgggcaacactctgtctcaaaaaaaaaaaaaaaaaagaaagaaaagaaaatgtaggggccagttactgtggctcacatctgtaatcccagcacattgggaggccgaggtgggcggatcacttgaaaccaggagttgcagaccagcctggccaacatgatgaaaccccgtctctaccaaaaatacaaaaattagccggacgtcttagtgcaagcctgtagtcccagctactcaggaggctgaggcatgagaatcgcttgcacctggggagatggaggttgcagtgagccgtgattatactactgcactccagcctgggcgacagagacagactccatctcaaaaaaaaaaacaggtgaaattgatttcaataatgtatttaacctgtatttaaaactatgtcgaaatcacattgtagcatggggcactggccatgtttcagatgttgagtatgtgactgtatggaatggtatagaactagagaggaaaaccagtccctgaagaaggtggcaataagtgaagtgtaatagcaggaaaaaagtaatggtaggaaaaacaaggaagaaggggtggctttttttttctgagatgaagtttcgctcttgtcgcccaggctggagtgcaatggcatgctctcagctcacttcaacctccgcctcctgggttctactaattctcatgcctcagcctcccgagtagccagaatgacagacatgtaccaccgtgcccagctaatctttgtatattttggagagacatcactttgccatgttgcccaggctggtcttactccttgcctcaagtgatccacctgccttggcctcccaaagtgccaggattccaggcatgagccactgcacctggtcagggtggctctttctttagaaggtacctttcagcagttattggagctgctacctgtaggctgagaaagaaccatccaggagaagagtgtttcaggcagagggaacagcaagtgccaaggccctgaggcagaatttcaagatggggtcagtgaggggcagaggcaaatcgcccagggccctggaggcagaagggagaatcctgggttttcctatagtggggtgggagcgtttgaagcagagttgggcttctcatgtgtccttcctccccgcaggctggacatactgcaccaggttgctatgtggcagaagaacttcaagagaattgtgagtgcctaaatggagcaaggtggtgggaaggagcttcctggggaggttggggataggacccagaggaagcccatcgctgggttttctctggactgctcggctggggcctcatctgtctcctgaactattcaccgatgggtccatttttggttctcttttttttgtttgtttttgagatggagatggagtctcactctgtcacccaggctggagtgcagtggcgcaatcttggttcactgcaacctccgcttcctgggttcaagcgattctcctgcctctgcctcctgagtagctgggattacaggtgtgcaccaccatgcaggctaatttttgtatttttagtagagatggagtttcaccatgttggtcaggctggtctcaaactcctgacctcaaggaacctacctgccttggcctcccaaagtgctgggattacaggcgtgagccaccgtgcccagctcattttcagttgttttctgatcactcactgatgtgggcattgtggtgggtgagaggatatagcagggaccacgaggacaaaacaggcaaggtccggctgtgtgcaagtggctcaggcctgtaatcccagcactggaagctgaggtgggtgggttgcttggggccaggaaagaccagcctgggaaacagcaagacccagtctctaccccttcccccacaaccccaagaaaaagatgggcaaagtccctattctaatgaaggtcacagtgtcatgggaggagaagtgaaggtgagtcagatggtcatacgtaatgtgtaattatgagcatgtcccagagaatgggacgttcaaccttgggtctactgtagaagctaaccagatcaaggaggcagtggggctagtgtggagataacaggaacagggtgtgcaaaggccctgtggcagggaccacaaggaagccagtgttgccacagaggccagtgggagcagtggggaggagtctgggttttgtgccaagaacattgaagaatccattaccagtcagggtcttatccatccaccccagaggtctggccagtcctccccctgctcacaccttccctggctccccatcaccctaggaataaagtcatcagtctgctattctgagttcttcctgatttccttgccctgctcctctttcctgattctccctgtctgtgtcatttcccatggccctccctccttgtggctacaaccacattaaaattgttcaaaaaataggccggcacggtggctcacacctgtaatctcagcactttgggaggccaaggcaggtggatcacttgaggccaggagttccaaaccagcctagtcaacgtggcaaaaccccatctctactgaaaatacaaaaaattagctggggccaggtgcggtggctcacacctgtaatcccagtactttgggaggccgaggcggatggatcacgaggtcgggagatcgagaccagcctgaccaatatggtgaaaccccatctctactaaaaatacaaatattagttgggtgtggcagcgggcgcctgtagtcccagctactctggaggctgagacaggagaattgcttgaacctgggaggcggaggttgcagtgagccgagatcgcgccactgcactccagcgtgggcgacagagcgagactccatctcaaaaaaaaaaattagccgggcatggtgacaggcacccgtaatctcagctactagggaggctgaggcaggagaatcgcttgaatctaggaatcagaggttgcagtgagccaaggtcacaccacttgcactccacagcctgggtgacagagtgagactgcctcaaaaaaaaaaatcaatagttcagaaaataccgagcaccccctgcgtgcccggtggcagggcccctgcctttgtgaggctggcatggggcaggagctgtgacttctttaccctccccctcgctccccaagtactctgtgcttggccagagagagcccgtcatcatggtgcctcctgtctgacttccccgtggcaggactgatctgcccggctccctgacacctgcctcgtggacctgacccccctcctctttgtgcctccagagctatgccaagaccaagacgagagccgaggtgcggggcggtggccggaagccttggccgcagaaaggcactgggcgggcccggcatggcagcatccgctctccgctctggcgaggaggtaacaggacagggtggagggggcggggaggggtgggggggccagggaagggcctgggtgtttactcacacacagctgcgcacatctggcatggtattatgtcagccctgttccctccacctcatggaaccacctgggctggtgacatcggaactgaggcccttggacctcactacccatataaggggacagagatctgggagccatccactcctccctctcgcatgccctgtctcttcagcctgtggccacagcccctcttgaccccacctcctgtcaccctctcctgacccacacttcccacagcacccagagagctcttctaaatcgtggaacctgaactccggacctcggcctttgtgtggaacctgaactcctgaccttgtcattgtgggccctggtggctgcacacctttccccctcatcccctcctttccctctctgaccaggcagagatgactctctcttgttttttcggttgtgtttgtttttaactttttattttcttgaatgctaacaagatgactcagggtggtgccagccaccccatcacctgtttacctggccagctctcctcacctttcagggttctgggccacacctcctccaggaagccccccttgatctcctttccttccacatcccccggagctaccctgatttcttctacagctgagcctcttttctgccctgccggaatgtgaatggcatgagggcagggaccatgtctgttgtcttctctgctgcatttccaaggcccaggcgagggcagacaccaacacatggtgcttgcaggggtctccctgactgttgttgctcccagatcatactgcttgctccaccggagcatgtgcctgatgccttcctctcccgcttgacctgaaagttcgaacctcctgataacttcagcattaacagcgtgcttgagttaagttcacactctagccactctatggaatccacaccataactcatggtgtcctatggggcaggaactgtccgatctcaaggtggtttgttttttttattgtttgcttttgagacaagatctcgctctgttgcccaggctgtagtgcagtggtgcaatcatagctcactgcagccttgagctcctgggctcaagtgatcctccatcctcagcctcccaaaatgctggtgtgagccaccttcgccagccctgtctcagagtgtgacagctgggaaaactgaagcccagtgaagcaaagtcactggtcccatgttgtccctgatccagcctcccctgaggccccaccctctctgccttgttcctggcagcgccccctctctcgtcaccccatgccagccactgcagcagattgctgacctccaggctctgcagtggcccctacctgctcacatgcctctgtccccgcaggaggtgttgcccatggcccccggggccccacaagttactactacatgctgcccatgaaggtgcgggcgctgggtctcaaagtggcactgaccgtcaagctggcccaggtacagccatgggggggcccagacagctgctagaggtggggctgctctggacccagggttcaaaccatcctttccttccaccaggacgacctgcacatcatggactccctagagctgcccaccggagacccacagtacctgacagagctggcgcactaccgccgctggggggactccgtactcctcgtggacttgtgagggcacagggcagagcaggggcagggggccctgagctccgtactctgagggttcaacccccactccctggcctctcttacagaacacacgaggagatgccacagagcatcgtggaggccacctctaggcttaagaccttcaacttgatcccggctgttggtgagcaaagagcccaggcccctagagtgcgcatgtgcaggctccgctgttagaatcacagcggttcaaatccggcatctggtcgctgagtggcctcaggcagtgaccacgctcccggacccaaccttcagcttgcccaaagcaataatctttcctaaagaagtgcttggctggggatggtggctcacgcttgtaatcccagtactttgggaggccaaggcagtctgggcaatatagtgaggctcccatctgtactaaaaataaaaaagttaggcgtggcgatgtgcacctgtagtcccagctactcgggggctgagccaggcggatagcttgagctcagggggccaaggctgcagtgagtcatgatcgcaccactgcacccaaacctggggagagagctagactcttgtctcaaaaaaaaaaaaaaaaaaaaaaaaaaagctccaaagtcacctctgtcaaagccacagtctgttccttccacagccacaagatggcgacatgagcctaagtcaagtcctgtccctcaacccacgcccctcgctggcttccccacctctctcaggatgaaagcccaagtcatcagggtggcacgtcaggccctgcacgatgtgccccgtcacctccctgccctcccgtcatttgccctgggtctcccccaccagaatgggagccaggagtcccagccaggcacaggaccgagcctggctctcggtcagcaggtgatgagctgggagcagctccttggccagaggcttacaggcaacaagcggccaggcagggtctggccccgggctgctgggctcacaaagtcacactagaccacagtgacgatctctgtaagcacaaagggactccgatgtgggtggggtgaggagagaggcagccccggcctgaccggccccccgccccgcccccaccccgcccccaggcctaaatgtgcacagcatgctcaagcaccagacgctggtcctgacgctgcccaccgtcgccttcctggaggacaagctgctctggcaggactcacgttacagacccctctaccccttcagcctgccctacagcgacttcccccgacccctmccccacgctacccagggcccagcggccaccccgtaccactgttgawgtgaagcacctcttytgagccaggccgagcccctggccgacttgggagcctyaggcccacgcccacccttcgaggaaggtgtcacctggaccccttcattccacggaggaagctgaggccacagggagcggccatcgccattgggaaggggcgactccacggaragcccagacgggcttytgcatccattccctctttttgtttttaaaataaattgtatttttgaatcaaggaggataaagataacttctcagtgtcatttttgataattgcattgagaacgatgagctccttcccaggttctgggcactgttggggatccgccgtctcaagaggctcacggtctggtttaggggaaccccagggctgtttgtggaaattacaagaattcacttacccggtgagtcagactccaggagctcacaggtgcgtgggcgctggcacttcctaggagctgactcctgccacatccctctcctgagcactgctgccagccattctcacccctgagagggtttgcagtcctgtctgcgacagtacttcatgcagcctgagagtgtgtgcttgattgtacaagtagatgttgtgtaaacctgagttttcagagtgacttcctgtaagcacagtcagaaaagtaaatgtctctctgtaagtgagcagataagcacatgcttaaaaacaccagctgggcgtggtgactcgcacctgtaaccctagcactttgggaggtcaaggtggaaggatcgtttgagctcagagcttccagaccagcctgggcaacatggtgaaaccccatctctgcaaaaaatataaaaattaagtgggcgtgttggcgtccacctgtggtcccagctacttgggaggctgaggtgggaggatcacctgagcccaggaagcagaggttgcagtgagctgagactgagccaccacacaccagcctgggtgacagagtgagacactgtcttaaaaccccaatatcccaatttttgagtttgctgaggttgccagccaagttaatttttcttaacagccataacagactataatatagacaatgtgatcgatttatttaaagtcaaccagctgggcgcggtggctcacgcctataatcccagaattttaggaggctgagccaggtggatcaccggaagtcaggagttcgagaccagcctggccaagccgggagtggtggcgggcacctgtaatcccagctacttaggaggctgaggtgggagaatcgcttgaacccaggaggcagaggttgcagtgagccaagatagcgccactgcgctccagcctgggtgacagagcaagattccatctataaataaataaataaataaagtcaatcaggactgccttctgcctgtgtgggcctggccaggctaagcagccacacaaccctccctacctgctgggccacccctggctgaaaacctctctggaatgcctctcttgggattgccttcagagattgcaacacattctccaaacaccctcagtggacatagactttgatccttgaagcagcagatttgactaagtaaaaaagaaaaagctattaaaaccagttggctgggcgcggtggctcacgcctgtaatcccagcactttgggaggccgaggcaggcggatcacgaggtcaggagatcgagactatcctggctaacacagtgaaaccccatctctaccaaaaatacaaaaaattagccgggcgtggtggtgggcgcctgtagtcccagctactcaggagactgaggcaggagaatggtgtgaacccgggaggtggagcttgcagtgagccgagatcgcgccactgcactccactccagcctggcgacagagctagactgtctcaaaaaaaaaaacagaggcgtgccaaagctcagcagaaaatgccgcctcatcactcttcctcttgccagtcttgtgggggcaccaaggcctagagtaacacccagctgttggcctgacagtgcctggcccagcctggagagttgcagccagaagtataaatgtggttcagtctgcgtcatacctgtcaggaaacatggtgagaccaactgctgcccagacggattttcaaaagaaatgggtcagaacgtattcccccacactggaatccctcagccagattgaggataaaaacaggcatcagaaaaaaatgatacaggcaggcctggtggctcatgcctgtaatcccagcactttgggaggctgaggcgggaggatcgcctgagcacaggagtttgagaccagcctgggcaacacagtgagaacctatctctactaaaaatagaacaattagccaggcacggtggtgtggctgtggtcccagctactctggaggctgaggtgggaggatcacttgagccctaggggtagaggctgcagtgagcggagatcaccccactgcaatccagcctgggcaacagatcaagaccctgtctcaaaaaaaaaaaaaagaaaagaaaacaaaagaaaaatatgatacactgactagaatgtgctttaaaataattggcatagttgggtatggtggcatgcacctgcagtctcacctacttggaaagctgtggccaggagtttgagaccagcctgggcaacacagcaagacctcatctctataaaaaataggcggggagcagtggctcacgcctgtaatcccagcactttgggaggccaaggcaggcggatcactagaggacaggagttcaagaccagcctggccaacatggtgaaaccccatctctactaaaaatacaaaaattggcaggatgtggtggcgggtgcctataatcccagctacttgggaggctgaggcaggagaatcgcttgaacctgggaggcagaggttgcagtgagccgaggtcatgacactgccctcaaacctgggtgacagagcaagactcggtctcgaaaaaaaaaataatgaatgaatgaattaattcattaattaaatagggggggtatatgagtttgttagggctgccgtaggagtgccacaaactgcaggggttgggggggttagtcaacagaaatttattctgtcctgtttctggaggctggaagtccaaggtgaagaacagggttagctccttctaagggaaaatctgttccagatccctctcctagcgtctggtggtttgctttgctgactatctttgacattccttggcttgtagccacactgcttcagtctccaccttcatctttacatgatgttgtccctgtgggtatgtgtctgtttctgtgtctaaatttctcctttttatttttttcttttttctctatctttttttttagacggagtcgcgctctgttgcccaggctggagtgcagtggctcgatctcggctcactgcaacttctgcctcctgggttcaagcgattctcctgcctcagcctcccaagtagctgggattacaggcgcccaccaccatgcctggctaatttttgtgtttttagtagagaaggggtttcgccatattggccaggctggtaacctcaggtgatccacccgctttggcctcccaaagtactgggattacaagcgtgagccaccgaacctggcctattttttcatttatttttagacagagttttgctcttcttgtccaggctagagtacaatggcgcaatctcggctaatctcaacctccgcctcccgggttcaggcgattctcctgcctcagcctcccaagtagctgggattacaggcatacgccacaatgcctggctaattctgttttgttagcagagatggggtttcaccatgttggtcaggctggtctcgaactcccgacctcaggtgatccacccacctcagcctcccaaagtgctgagattacagacacgagccactgagcctggccctctcctttttatttttaaaatatattttgtggacggcagcagtggctcacacctgtaatcccagcactttgggaggccgaggcgggtggatcacaaggtcaggaactcgagaccagcctggccaatatggtgaagccccatctctactaaaaatataaaaattagccaggcatggccgggcgcggtggctcacgcctgtaatcccagcactttgggaggccgaggcgggcggatcacgaggtcaggagatcgagaccatcctggttaatacggtgaaaccccgtctctactaaaaatacaaaaaaaaaattagctgggcgaggtggcaggtgcctgtagtcccagctactcgggaggctgaggcatgagaatggcgtgaacccgggaggcggagcttgcagtgagctgagatcgcgccactgcactccagcctgggtgacagagtgagactccatctcaaaaaaaaaaaaaaaaaatttagccaggcgtggtgtcagaagcctgtagtcgcaactacttgggaggctgaggcaggagaatcacttgaacccaggaggtggaggttgcagtgagccgagaccacatcacggcacatctaaaaaaaaaaaaagttttctgtttttgttttttgcaaaactactgaaataaatacagtgagatatttatttataaatgagaacgaattaataatgagccgtaggctgggtgtggtggctcatgcctataatcccagcattttggggggccaaggcaggtggaacacttgaggtcaagagttcgagaccaggctgaccaatatagtggaaccccatctctactaaaaatacaaaagaattagccgggcatggtgccgggcgcctgtaatctcagctatgggaggctgaggtaggagaatcgcttaaaccctggaggcggaggttgcagtgaggcgatatcacgccactgcactccagcctgggggacagagcgagactccatctctaaataaataaataaggagctgtatttcaaaatttggagaaggtgacactgagagtactgaatacacagttttttgtttttttggttttttttgagacagagtctcgctctgtcacccaggctggagtgcagtggtgcaacctcggctcactgcaatctctgcctcccggttcaagcaaatctcctgcctcagcctcccgcgtagctgggattacaggcacgcatccccatgcctggctaatttttgtatttttagtagagacgggatttcaccatattggtcaggctgatctcaaactcctgacctcgtgatctgcctgcctcggcctcccaaagtgctgggattacaggcgtgagccaccgagcctggccccaaaaaatatttatcaaaactatgttaatgctggccgggtgcggtggctcatgcctgtaatcccagcactttgggaggccgaggcaggtggaacacgaggtcaggagattgagaccatcctggctaacacggtgaaaccccgtctctactaaaaaatacaaaaaattagccgggcgcggtggtgggtgcctgtagtcccagctactcaggaggctgaagcaggagaatggcaggaaccggggaggcagaggttgtagtgagctgagatcgcgccattgcactccagcctgggcgacagagcgagaatccgtctcgaaaaaaaaaaaaaaatacacacacacacacaaaaactgtgttaatgcttaactacacaaaaatgataatcagataaatatgcatttatttagagaactgcatgttggtcagtccagtccctgcagagggaattcccagcatgacctcattcacttgtgaagacagagcaatccttgtgttttatttttttaagatggatctcactctgttgcccagactggagtgcagtggcatgatctcagccctctgccacctccaccttccgggttcaagagattctcatgcctcagcctcctgagtagctgagattacaggcttgtgcctccatgcccagctaatttttttatttttactagagatgaggtttcaccagtttgggcaggccggtctcaaactcctgacctcaagtgatccacccacctcggcctcccgaagtgctgggatgacaggtgcctggtcagcaactgttgtttagacatacacattttatctgctcgtccagcatggtcagccctccactttttaaattttattttatttatttttttgagacagagtctcactctgttgtccaggttggagtccagtggcgtgatttcggctcactgcaacctctacttcccaggttcgagcaattctcctgcctcagcttcccgagtagctgggattacaggcccgcgtccccacacctagctaatttttgtatttttagtagagacagggtttcaccatgttggccaggctggtctcgaactcctgacctcaggtgattctcctgccttggcctcccaaagtgctgagattacaggtgtgagccactgcacacggccttaaattttatttattatttatttatttatttatttagagacttagtctcactctgttgcccaggctggagtgcagtggcatggtctcggctcactgcactccacctcctgggttcacgccattctcctgcctcagcctcccgagtagctgggactacaggcgcccaccaccactcccggctaatttttgtatttttagtagagatggggtttcactgtgttagccaggatagtctcgatctcctgacctcgtgatccgcctgcctcggcctcccaaagtgctgggattacttattttgttttttgtagagacaggttctcactgtgttgcccaggctggtcttgaactcctgatctcaagtgatcttcccacctcagtctctcaaagggctgggattacaggggtgagccactgcaccccaccttccctctactttttgacggtttccttctgctatgaatgtgcatgtccagttgtctgcttcttagaactgatatttaccttcctcatccatcagccattggaggaggactgggaccgctcagattattgatctgacccattctttcggcagggtttcctggtggctgtcttccatcaccaaaactggaatcagaagagtttccatagccctttttttttccccacatctttgctgaagcagagttttgaaaaacaaaaccacaaactaagctattccccagaagaaatctgtaatcaaagataagctctgccgggcacagtggctcacgccttttggaggccaaggcgggcggatcacctgaggtcaggagttctagacctgccaggccaacatggtaaaacctcatctctactaaaaatacaaaaattagctagatgtggtggtgggtacctgtagtctcagctacctgggaggctgaggcaagagaatcgcttgaacctgggaagtagaggttgcagtgagccgagattgcaccactgcactccagcctgggcgacggagtgagacgacctcacaaaaatttacataaataaaatgaaaagtaaaataaaaatacaaaagttggccgggtgcgtttgctcacgcctgtaatcccagcactttgggagggtgaggcaggcagataatgaggtaagaagatcgagaccatcctggctaacacggtgaaaccctgtctctactaaaaatacaaaaaattagctgtgcgtggtgacacgcacctgtagtcccagctatttgggaggctgaggcaggagaatcacttgaacctgggaggtggaggttgcagtgagccgagatcgcaccactgcactccagcctgggccacagagtgagactccatcttgaaaaaaaaaaaaaatacaaaagttagccaggggtgttggtgggtgcctgtaatcccagctatttgggaggctaaggcagaagaatttcttgaacctaggaaacggaggttgcagtgagccgagatcacacctctgtactccagcctggacaacagagcgagactttgtctcaaaaaaaaaaaaaaaaaaaaaactaaataggccgggagcagtggctcatgcctataatcccagccctttgggaggccaaggcaggtggatcacttgaggtcaggagtttgagaccaggctggccaacatggtgtaaccccgtctctactaaaaacacaaaaattagccgggtctggtggcgtatgtctgtaatcccagctactcgggaggctgaggcaggagaatcacttaaacctgggaggcaggggttgcagtgagctgagatcgtgccactgcactctagccagggtgacagagtgaaactctgtctcaaaaaattaaaaaagaaattcagcaagtaatgagttaaggaattcgaatattaaggcgagtgacaaggaacgcccaggatgtggcccaggatggagtaggggggacactcatttaggagaaagctcaggccacaagacaggaggagccagccttgttggggttgaagggaagagcattccaggctgagggaactgcaaggcgtttgcatgggacactatgggatggcttctgcccttggtgggcagcctctggtctgaggccattctttggcctgcctgactgtctggcaaccgggaggaagccctgcccttcctggagacagaaacaaaggtctaggaaatatctgcttcccttttccttgaaaaacgcttaagggaacggaggactgggaggtgccgtctctctctgccagcctgccccctaccatagccatcccactcccatctcagaaagtgacccgccatcctccaaaaggctcggaccctgatcaaggagtcatcccccttgtcccagcacctccagttggcccagcctccaaaacggatgtcaaattcagccctttctccaaggacactgcccagtccaggccccactatcattcatctggactagaacagtcacctcctctcccatctcctggctgcagctcttgaagcctcaactgggcccctgtgaacacttgagttagggcaaggtccttcctctgctcagaaccctctatacctcccacctcgctgggcataaaagccaaagtcctggccaggcacggtggctcacatctgttatcccagcactttgggaggccaaggggggcggatcactagaggtcaggagttagagaccaacatggtgaaaccccatctctactaaaaatacaaaaattagctaggcgtggtgacgcacccctgtagtaccagctactcggtaggctgaggtgggagaatcgcttgaacctgggaggcagagtttgcagtgagccgagatcacaccactgtgctccagcctgggtgacagaacgagactggggttcagaaacaaacaaacaaaacaacaaagtcctcctcaggtgacaggaacttgcacctatctgccctgtcatctccctgcccgctcctctcctcgaatctctcctttgctaagcctgctccagccacactgttctcctggctgttcctttttttttttttttttttttttttttgagtctcactctcacccaggctggagtgcagtgcctctatcttggctcactgcaacctccgcctgccgggttcaagagattctcctgcatcagcctcccaagtaggtggaattacaggtgtgcaccaccacacccggctaatttttgtattttgcatagagatgggggtctccctatgttgcccaggctggtcttgaactcctgggctcaagtgatcctsccatctcggcctcccaaaatgctgggattacaggtgggarccgcgcccaggtggatttttgtctgactctgttcattcctgtgtccccagtacctggaaggacgccaagcacacagtaggcgcttaaaaaacattgagccacatgttgagaaaagaacggcaccattgtggctgcaagtgggacktgggccgcgcgggggagctcgcgcacctcgggccggggcaagagctcagtggaacccgcccgaggaagaacccgtggcgcaggattttcccaggccttctgaggaccaggggcgtcccccgtcccaccctgtgactttgctcaggccgttccggggcgggaattcagaactcctcagccccccaagaaaaaaatatccccgtggaaattccttgggaatgaccgaggcgggggaaatatgcgtctctggatggccagtgactcgcagcccccttccccgataggaagggcctgcgcgtccggggacccttcgcttccccttctgctgcgcgacctccctggcccctcggagatctccatggcgacgccgcgcgcgccccacaacaggaaarccttaggcggcgcggcttggtgctcggagacttaagagtacccagcctcgacgtggtggatgtcgagtcttggggtcacacgcacaggcggtggccaagcaaacacccgctcatatttagtgcatgagcctgggttcgagttgccggagcctcgcgcgtagggcaggggttcgagcgccccttctccctgcctcgcctctgcgcctgggggctgctgcctcagtttcccagcgacaggcagggatttcgagcgtccccctcccctccctcgtcaagatccaagctagctgcctcagtttccccgcggagcctgggacgcnngcggaggggctcggcgcgtagggatcacgcagcttccttcctttttctgggagctgtaaagacgcctccgcggccaaggccgaaaggggaagcgaggaggccgccggggtgagtgccctcgggtgtagagagaggacgccgatttccccggacgtggtgagaccgcgcttcgtcactcccacggttagcggtcgccgggaggtgcctggctctgctctggccgcttctcgagaaatgcccgtgtcagctaggtgtggacgtgacctagggggaggggcatccctcagtggagggagcccggggaggattcctgggcccccacccaggcagggggctcatccactcgattaaagaggcctgcgtaagctggagagggaggacttgagttcggaccccctcgcagcctggagtctcagtttaccgctttgtgaaatggacacaataacagtctccactctccggggaagttggcagtatttaaaagtacttaataaaccgcttagcgcggtgtagaccgtgattcaagcttagcctggccgggaaacgggaggcgtggaggccgggagcagcccccggggtcatcgccctgccaccgccgcccgattgctttagcttggaaattccggagctgaagcggccagcgagggaggatgaccctctcggcccgggcaccctgtcagtccggaaataactgcagcatttgttccggaggggaaggcgcgaggtttccgggaaagcagcaccgccccttggcccccaggtggctagcgctataaaggatcacgcgccccagtcgacgctgagctcctctgctactcagagttgcaacctcmgcctcgctatggctcccagcagcccccggcccgcgctgcccgcactcctggtcctgctcggggctctgttcccaggtgagtcggggtggggattgccgtcgggccagttctccgaagccccgggaggaccggctcccgggtcaggtcatgcatgcttaggtagctgtttatgggaaggaggggctagagacagcgattgaaaggcaacagccagtaggttcgaatccagaccctgcatacctccacgtgtggccttgggctatagattgcagctttaaaaaagggtagggggttggagatggaggggaggggcgggcctcgttttgttgcccaggccggtcttgaactccgggggtctagccttacctcctgcctcagcctcccgastagctgggatgagaggtgtgaaccaccgccttgcttggctagattgcgtctcttacagtttctcagytgtaaaacgggaaacgttatagcggccacctggcagggtatcttggcccagcgcagcacctggccccaggactcgatcatgatggtttgggaacttggctctgtgccaacccaacaaggcttaagggacccccacccccctcaagatgtatattctgttcctcatcctctctgcccctggggaagtccagggctgcttctacttgggggaattccagagctgacttatccgtggcccaaagctgagaagtgggacrccccagcacaccctcccccagctccagcccagctagggaagagggaaggggtcagagggtctttcatggtggtgtaagtttggggaaccaggagggtggragattgacagcttggttaacagctcaacaaagcctgagatccaggccagcacggtagttcatgccagtaatcccaacactttaggagccccaggcgggcgaatcacttaaggtcaggagtttgagaccagcctggccaacatggcaacatcccgtctctactaaaaatacaaaaattagctggcatggtggtgggcgcctgtgatcccagctgctcgggaggctgagggaggaaaatcccttaagcccacgaggctgaggttgcagtgaaccaagattgtgccactgcactccagcctgggagacatagcgagattctgtctcaaaaaacaaagcrttctgatccggactcagacccagatcgcactgctttctagctgagtaaccatttctctctatgaaatgggaatggtcccagaatctcccttggagaatgtatggagccagtgtcctcacacccccatccaagatagaacaaatctgagacaggaatctttgagtgaggcagtgctgggctcagacattttttcccaccttcggaggcagcagaatytgagggacctgatccaaataagccccttctttctttcttttcttttcttttttttttttttttttttttgagacggagtctcactnngtckcccaggctggagtgcagtggcgtgatctcggctcactgcaacctctgcctcccaggttcaaacgattctcctgyctcagcctccctgagtagctgggactacaggcatgtgccatcacacccggctaatcactgtgttagccaggatggtctcgatttcctgacctcatgatctgcccaccctgcctcccaaagtgctgggattacatgcgtgagccacagtgcccaccccgtaagccccttctttcttacctgcaaggtagccagttgctacccatcctgtgctgagttacttgtattagcaagggatggggtggctatactcacccaccttacagatggggaaattgaggcccaaagagggggaaactacrtgtctcagggagtgaggagccagtctgattcctggagggctgactgtctccacctgacttcttaggagggaggagggcaccaacttcacattaaaatctggttggacacagtggctcacacctgtaatcctggcattttgggaggcttaggcgggaggatcacttgaggccaggagtttgagaccagccttagcaacatagtgagaccccatctctacaaaaatgtttttcagggccaggcgcggtggctcacacctataatcccagcactttgggaggctgaggcgggcggattacctgaggtcaggagtttgagaccagcctgaccaacatggagaaaccccgtctctactaaaagtacaaaattacccgggcgtggtggcgcatgcctgtaatcccagctactcgggaggctgaggcaggagaatcgcttgaacctgggaggcggaggttgcggtgaactgagatcgtgccattgcactccagcctgggcaacaagagctaaactccgtctcaaaaaaaaaaaaatgtttttcaaatattagccgggtatggtggtgtcctgtagtcccagctacttgggaggctgagatgggaggatcacttgagcccaggagttcaaggttacagtgagctatgattgtgccactgtattccagcctgggtaacagagggagacccgtttaaaaaaaaaaaagtgatggctaaagtccttccatggctccctattgccctcagtataaagaacacatgtggctgggcgtggtggttcacgcctgtaatcccagcactttgggaggctgaggcgggcggatcacttgaggccaggagtttgagagcaggctggccgacgtggcgaaaccccgtctctattaaaaatacaaaaattagctgggcgtggtggtgcttgcctgtaatcccagatactctggaggctgaggcaggagaatmacttgaacccgggaggcaraggttgcagtgagctgagattgygccactgcactccagtctgagtgacaaagcgagactccatctcaaaaaaaaaawaaataaaagaacacatctttagcatggccttcagtgctcacgggatcttcctgaattaatctccccctcttcatccttgctcactcagctccagccaccctgccccgggacatctgtacttgcctggaacttatttcccttttctccggacagccagccctttctcgtcatttagatctctgctgaaacattaccctgtcaccaaagcactgtctattctatcaccctgttttgtttttgtcaaagctcatattaacatcagttattaattatcttgtttgctcataatttttttttttttttttttggagacagagtctcgttctgttgctcaggctggagtgcagtggcacaatcttggctcactgtaacctccacctcccaggttcaagtgattcttgtgcctcagcctcccaaatagctaggactacaggcacgtcccaccatgcccagctaatttttgtatttttagtggagacggggctttgtcatgttggccaggctgatctcaaattcctgacctcaagtgatctgcccgccttggcctcccaaagtgctgggattacaggcgtgagccaccacacccggcctgctcatgaattttctctttaacttccacatcgaaggcaaagtattgtcttgttaaggctgtgcctccagcacccagcacaggctgggcgcacattcccttgatgaacctgatttgtaatgcctgtygcctcttccctcgtttcttctaggacctggcaatgcccagacatctgtgtccccctcaaaagtcatcctgccccggggaggctccgtgctggtgacatgcagcacctcctgtgaccagcccawgttgttgggcatagagaccccgttgcctaaaaaggagttgctcctgcctgggaacaaccggaaggtgtatgaactgagcaatgtgcaagaagatagccaaccaatgtgctattcaaactgccctgatgggcagtcaacagctaaaaccttcctcaccgtgtactgtgagtaactgagcccggagggctggactaggcagaccsggtgggagagacgtgcagrggcacctgcagaggcctgggggaatctttgccacttgctcgtagggtcaaggaggggctccttgcagggcaggtggggacatccttggaaagtccctttgtgaatttctttgggtacaattaaagtatttacaggctgggtgcggtggctcatgcctgtaatcccagcactttgagaggctgaggctggcggatcacctgagatcaggagtttaagtttcgccaacatggcgaaaccctgtctctgctgaaaatacaaaaatcagccgggcatggtgtcaagcgcctgtaatcccagctacttggaaggctgaggcaggagaacgcttgaacctgagaggcagagattgcagtgagccgcgatcgtgccagtgcactccagtctggataacagagcaagattccatctcaagaaaaaaaaaatgccatctctctatgcctcactctttgaacatatgacacggtcctgcttcagacactttaataaaagatgcaaattaagccaagtgtggtggcttgtacctataatcccaactactccagaggctgaggcagaaggatggtttgagcccaggagtttgagaccagcctgggcaacagagtgagaccctgtttctttcttttttttttttttttttttgagacggagtctcactctgtcgcccaggctggagtgcagtggtgtgatctcggctcactgcaagctccgcctcccgggttcacgccattctcctgcctcagcctcccgagtagctgggactacaggcgcctgccaccatgcccggctcatttttttgtatttttagtagagacggggtttcactgtgttagccaggatggtctcaatctcctgacctagtggtccgcccgcctcggcctcccaaagtgctgggattacaggtgtaagccactgtgcccatccaagaccctgtttctaccggaaaaaaaaagtaaataatttagctgggcatcgtggtgtgcacctgtaatcccagctgctcctgaggctgtgatgggaggattgctttaacccaggggttcgaatcctaggagttcgaatccatcctaggcaacatagcaaaaccccatttttatttaaaaaaaaaaaaaaagatatgagttaaaactagccctgggatggcatttttcacatattggtaacaaacraaagaattgatggccgggcgcagtggctcacgcctgtaatcccagcactttgggaggccgaggcgggcggatcacaaggtcaggagatcgagaccatcctggctaacatggtgaaaccccgtctctactaaaactacaaaaaattagccgggcatggtggcaggcgcctgtggtcccagctactcaggaggctgaggcaggagaatggcatgaacccgggaggcagagcttgcagtgagccaagatcgtgccactgcactccagcctgggcgacagagcaagactccatctcaaaaaaaaaaaaaaaaaaaagaattgataacagctgtgctgccaaggctattggaacgtaggaggtcctaggacagtgctgttgggagcataaataagcccaaccctgtggcgggaaattgggcatcagttctcaaaatgtcatgggctgggcacggtggctcacgcctgtaatcccascactttgggaggctgagggaggcggatcacttgaggtcaggagttcgagaccagcctgaccaccatggagaaaccccgtctctattaaaaatacaaaaaaaactagccaggcatagtggcacatacctgtaatcccagctactcgggaggctgaggcaggagaatctcttgaaactgggaggcagaggttgcggtgagctgagattgcgccactgcactccagcttgggcaacaagagcaaaactccatctcaaaaaaaaaaaaaaaagaaataaaagaaggtatgttgaatatgagtggtatgccaccctcacattagggaagggcagtttcggggaggctgtatttatgtataaaatagccctamaaggaagtgggagaaatgacaatattagctggctatgagaagagaggctgggaggctgtgggagagggcttgggtgtggagaattctttttgttttttcctttttttgagacagagtttcactcttgttgcccaggctggagtgcaatggcacgatctcagctcmccgcaaccttcacctcctgagtttaagtgattctccggcctcagcctcccgactagctgggattacaggcatgggccactacgcctggcaaattttgtatttttagtagagacagggtttctccatgttggtcaggctggtcttgaactctgacctcaggtgatccgcccgcctcggcctcccaaagtgctgggattacaacgtgagccactttgcctggctgagaattctttttttgttgttgtctttttgagatggagttttgctgtgtccccagcctggagtgcaatggtgtaatctcagctcactgcaacctctccctcccgggttcaagcaattctcctgcctcagcctcccaagtagctggaattacaggcgcccagcaccacgccyggctaatttttgtatttttagtagagacgggatttcatcatgttggccrggctggtcttgatctcctgaccttgtgatctgcccgcctcggcctcccaaagtgctgggattacaggcgtgagccactgcccccagccragaatttctctttgygtccttcctactttggggacttcgaatggtgggaaagagttatcaaggccaaaataaggaattcaaatgaaaacaaaacaaaatcaaagaagaaaaaacagaagagcactgggcaggctaggcacgtggctcatgcctataatcccagtgatttagaaggccgaagtagaaggatcgcttggaggccaggagttggacaccagcctgggcaacatagcaagaccccatatctacaaaaaataaaaaacctaaccaagcgtgctggcatactagtagtcccagctactcaggaggctgaggtgggaggatcacctgakcctgggaggtccaggctgtagtgagccgtgatgacaccactgcactccagcctgggtgacagakaaagaccctgtctctaaaaaataaaaactggccaagtagctttgggattagccttgggttccagtcccagcaaggcctttaatagcttgggacatgacttctgcatttactttgcaatcaggtgagacctcctctgatggggaaaatgacacggtgagtgacaaaggatgttctcctatcattgtgtcagggcaaggaagcctctgggtaaatgatcaaatgatcagctttgcttctgatttggagggtgggtgagcagatgctgaccttcccaggtgagggaagtccccraacattcccagcagcttctggaaaccccagggaaacctctttgaaggtcttttctgcatctctgcctgataggtctttttttttttttttttttttttyttttttttgacacacagtcttgctctgtcgcccaggctggatcactgcaacctccatctcccgggttcaagcagttctcctgcctcatcctctccagtagctgggattacaggcacctggcaccacgcctggctaatttttgtatttttagtagagacagggtttcgccaagttggccaggctggtctcgaactctagacctctggtgatccacccgcctcagcctcccgaagtgctgggattacaggcttgagccaccaygcgcggctctgcctgatagctgagagcatagaactccaggtttgagacctggmtctgccacatttctccctctatgactgtgggtgccccactttgccttagtttttacctctgtgaaatggagcagatggctggcacaggtagcaaaggagtaaaagttatgtgggagggtggtacctgagagagactctagcttggtcttgccccacccctggtgtaaacataaagaagcctccctggatggctcaatcttctccaaaaaggttagaggtgtaattcctagaggaggcgaccactagctgggctttgaaggatgtgtaggagttcataaggacaggcattctgggcaggaggaacagcctgggcaaaagttgggagcagggagaaatcttgatggaggcaggaggaggaggaggtaggttggtgtrggccaggygcagtggctcacacctgtaatcccagtgctttgggaggccaaagcaagaggattgtttgagcccaggagttcgagaccagcctgggcaacatagcgagaccctgtctctaagaaaaaataaaaaaattagggtacagtggcatatgcttgtattctcaactactctggaggctcaagtgggaggatcayttgaacccaggaatttttttgtttttgtttttgtttttttgagatggagtctcactctgtggcccaggctggagtgcagtggtgccatcttggctcactgcagcctcctccacctcctgggttcaaccgattctgctgcctgagcctcccgagttgctgggattaaggtgcccaccatcatgcccagctaatttttttgtatttttagtagagatagggtttaccatgttagccaggctggtcttgaacgcctgaccgcaagagatcctcctgcctcagtttcccaaagtgctgggattataggtgtgagccactgagcctggtcaagcccaggaatttgaggttacagtcagctatgattgcaccactgcattccagcccaggtgacagagagagacactgcccctnaaaaaaaaaaaaaaattgattgatgggaggaagggtgaggttggcagagccttgaatgccaggtggaggagctgggactttccttcttggggtgatagggagtcatggagggtttstgagcaggccagggattagatagctgaaggctggatttactggaagccaawgagcagttggctatggtccttgtccacgcggcccatgttgtgggcagtgaccgtattcaagaagggaaggacagacaagtatttgaatacttcagtgaccaggatttggtaaaggactgcaggtcagggtcaagaagaggtgagagcaggacagacttcctccccgctgcaccaggcagctgagctgggtttcctctaggggctgaggtttgagggtacctcaagttctgcaagagtctataggaggtggtaagagagaagagctggaggtcagagttttcttgactatatrtatatatatttttttgtttttgtttttaacagcttaacagctttctgttttatttttagagacagggtctcagggtctcactttgtcacccaggctggagtgcagtggtacaatcgtagctgactgcagcctcaaactcccaggctcaagaaatcctcctcccacccttagcctcctgagtagcagggactacaggtgtgagccagcaggaagcccagctggttttttttttttctttggtgttttttgtttgtttgtttgagaccggagtttcgctcttattgcccaggctgaagtgcaatggcaggatcttagctcaccacaacctccgacccccaggatcaagctattctcttgcctcagccacctgagtagctgggattacaggcatgcgacaccacacaaggctaattttgtatttttagtaaagacagggtttctccrtgttggtcaggctggtctygaactcccaacctcagatgatccacctgcctcggcctcccaaagtgctgagattacaggcatgagccaccgtgcccggccttttttttttttttttttttnntgagacagagtctcactctgtcgcccaggcaggagtgcagtggtkcgatctgggctcactgcaagctccgcctcccgggttcactccatcctcctgccttagcctcctgagtagctgggactacaggcgcccaccaccacgcctggctaattttttgtatttttagtagagacggggtttcaccgtgttagccaggatggtctygatctcctgacctcgtgatccgcccgccttggcctcccaaagtgctgggattacaggcgtgagccaccatgtctggcctggccaggctggtcttgaactcctgacttccggtgatccatctgttctggcctcccaaagtgctgggattacaggcataagccaccacgccatgccgaagcccagcttgtttttaatttttttttttttttttggagaaatgaggtcttgcaatgttgcccaagctagccttgaactcctggcctcaaatgaccccgccttggcatcccaaagtactgggattacagatgtgagccaccatgccccagccttgctttcttgagatacratttagaataccataagattcatcccttttaagcacataattcaatgacttctgtacaaacaaccatgactacaatctaattttaaaatatytcaatcactctaaamaagaaacctcctgcttatgtacagcgactctgtctacctcttaagtgamttctcctacctttaatagccctattttacagttcaggaaactgaggttcagngagacaaagtcacttacccacagcaaagaagcaaggctgggtatcaaatgcaggaccccccckgtcctgatgctttttttttttttttttttttcctctgagagagactctcactctgtcactcagtctagagtacagtggcgcgatctcagttcactgcaatctctgcctcctgggctgaagtaatcctttcctcacaagtaaacctcagcctctcaagtagctgggactacaggcacacaacaccacgcctggctaatttttgtatttttaggtagagacggggtttcactatrttggccaggctggtcttsaactcctgacctcaggtgatccgcctgcctcggccccccaaagtgttgggattacaggcgtgagccaccacacgcagcctttttgttattagactctgtcattactgacttttttttttttttaatagaaacagggtctttctttcccaggstaaagtacagtggcatgatcacagttcactatagccttaaactcctgggctcaagtgatcctcctgcctcagcctcccaagtagcagggactacaggtgtgcaccaccacacccagttaaccattcattcattcattcattcatttattttgagatggagtctcgctctgtcacctaggctggagtgcagtggcacgatctcagctcactgcaacctccacctcccaggttcaagagattctcctgcctcagcctcccgagtagctgagactacaggcgtgcaccaccatgccagactaatttttgtatttttaatagagacggggtttcactctgttggtcaggcttatctcgaactcctgacttcgtggatccaccctccttggcctcccaaagtgctgggattaaaggcgtgagccaccgcgccctgccaacctttttttaatttttcttagagatgggggtctccctatgttgcccaggcttgtcttgaactcctggcctcaagtgaccctsttgccttggcctcacaaagtgctaggattacagcctgagccatcacacctggccaacaggtttttttttttkttttgttttgttttttaaagaatgtctaggccaggctcatttactttcacctgtaatcccagcactttgggaggccggggtgggcagatcacttgaggtcaggaattcgagaccagcctgggcaacatgctgaaaccccgtttctactaaaaatacaaaaattagctgggtgtggtgacacgtgcctgtaatcccagctactcaggaggttgaggcaggagaattgcttgaacccaggaggcagaggttgcagtgagccaagatcatgccatcaccctccagcctgggcgacagaaggagactcagtctaaaaacttaattaattaattaattaaaaataaaaatacaaaaattaacctggtgtggtggtgtgtgcctgtaatctaagctactcaggaggctgaggcaggagaatcccctgaatcccagaggcagaggttgcagtgagccaagatcgagccactgtttgcccagtctagtgcactgggctgctgaatttatttgaccagacacctagcaatagactttgaagttcttttccacttttcactctaagatgctgctgtcatgaataaggaatattttgatccccttcacaaacactcggggccctcttaccagttttcactgaagatcttgacattcctatctgcttaggtgtctgggcgtgtttgggggagatactgaagaggtagggctcccaggcaggtgcagttcgtctgttaggcaggcagcaaggtccacttcaccagacacccccacctctgttttcctrcagggactccagaacgggtggaactggcacccctcccctcttggcagccagtgggcaagaaccttaccctacgctgccaggtggagggtggggcaccccgggccaacctcaccgtggtgctgctccgtggggagaasgagctgaaacgggagccagctgtgggggagcccgctgaggtcacgaccacggtgctggtgaggagagatcaccatggagccaatttctcgtgccgcactgaactggacctgcggccccaagggctggagctgtttgagaacacctcggccccctaccagctccagacctttggtgaggattgaagaagccagcagggagaaggtgggggtggggtatcctgcaatgcggtgcctgtggccacaggatcttttgagatgggtgtggccccggctaaggggtgcatgtgttctaggcgtatgtgacctaggctgctgagtggccctggaagaggatctcgcaggagggggaatgaaatgccccagagaagggcttcgggacgtccatccctgtctgctcacacctttcttctctccctagtcctgccagcgactcccccacaacttgtcagcccccgggtcctagaggtggacacgcaggggacmgtggtctgttccctggacrgkctgttcccagtctcggaggcccaggtccacctggcactgggggaccagaggttgaaccccacagtcacctatggcaacgactccttctcggccaaggcctcagtcagtgtgacygcagaggaygagggcacccagcggctgacgtgtgcagtaatactggggaaccagagccaggagacactgcagacagtgaccatctacagtaagaaggggcaggggcggagtggggcttcttgrgggtgtgacctgaacccggggcggggctcactgtgtgcctattccaggctttccggcgcccaacrtgattctgacgaagccagaggtctcagaagggaccgaggtgacagtgaagtgtgaggcccaccctagagccaaggtgacgctgaatggggttccagcccagccactgggccygagggcccagctcctgctgaaggccaccccagaggacaacgggcgcagcttctcctgctctgcaaccctggaggtggccggccagcttatacacaagaaycagacccgggagcttcgtgtcctgtgtgagtggggctgctggtcaatggcccctatcccccaaggcccaatctccctgaaggtcccataaggtcttgcctccaagtcctgcccccacccacctccatgtcatctcatcrtgtttttccagatggcccccractggacgagagggattgtccgggaaactggacgtggccagaaaattcccagcagactccaatgtgccaggcttgggggaacccattgcccgagctcaagtgtctaaaggatggcactttcccactgcccatcggggaatcagtgactgtcactcgagatcttgagggcacctacctctgtcgggccaggagcactcaaggggaggtcacccgcraggtgaccgtgaatgtgctctgtgagtgagccggcgggcagagctgggtgggggcaggggccatggacctaatgcaatcctcaccgcctgttgtatcctccccacagcccccyggtatgagattgtcatcatcactgtggtagcagccgcagtcataatgggcactgcaggcctcagcacgtacctctataaccgccagcggaagatcaagaaatacagactacaacaggcccaaaaagggacccccatgaaaccgaacacacaagccacgcctccctgaacctatcccrggacagggcctcttcctcggccttcccatattggtggcagtggtgccacactgaacagagtggaagacatatgccatgcagctacacctacyggccctgggacgccggaggacagggcattgtcctcagtcagatacaacagcatttggggccatggtacctgcacacctaaaacactaggccacgcatctgatctgtagtcacatgactaagccaagaggaaggagcaagactcaagacatgattgatggatgttaaagtctagcctgatgagaggggaagtggtgggggagacatagccccaccatgaggacatacaactgggaaatactgaaacttgctgcctattgggtatgctgaggycccacagacttacagaagaagtggccctccatagacatgtgtagcatcaaaacacaaaggcccacacttcctgacggatgccagcttgggcactgctgtctactgaccccaacccttgatgatatgtatttattcatttgttattttaccagctatttattgagtgtcttttatgtaggctaaatgaacataggtctctggcctcacggagctcccagtcctratcacattcaaggtcaccaggtacagttgtacaggttgtacactgcaggagagtgcctggcaaaaagatcaratggggctgggacttctcattggccaacctgcctttccccagaaggagtgatttttctaycggcacaaaagcactatatggactggtaatggttacaggttcagagattacccagtgaggccttattcctcccttccccccaaaactgacacctttgttagccacctccccacccacatacatttctgccagtgttcacaatgacactcagyggtcatgtctggacatgagtgcccagggaatatgcccaagctatgccttgtcctcttgtcctgtttgcatttcactgggagcttgcactatgcagctccagtttcctgcagtgatcagggtcctgcaagcagtggggaagggggccaaggtattggaggactccctcccagctttggaagcctcatccgcgtgtgtgtgtgtgtgtatgtgtagacaagctctcgctctgtcacccaggctggagtgcagtggtgcaatcatggttcactgcagtcttgaccttttgrgctcaagtgatcctcccacctcagcctcctgagtagctgggaccataggctcacaacaccacacctggcaaatttgattttttttttttttycagagacggggtctygcaacattgcccagacttcctttgtgttagttaataaagctttctcaactgcctcagccttgtgtgagttgaggggaggtgtcacatccagctggagtcctttctaagcagccacagcctgatcctcccacttcctcccccaagaaaacattgtgggttgatggycataccctgaggttctggtccaaatcggactttctatgaccttctgggtctctagtgaaaactaaagactcctctccagaaaaaaacatttggtttctaatgaggcctggaatcttattcttgacctggggagcggaatccctttttgcagtactcccgggccctctgttggggcctccccttcctctccagggtggagtcgaggaggcggggctgcgggcctccttatctctagagccggccctggctctctggcgcggggccccttagtccgggctttttgccatggggtctctgttccctctgtcgctgctgttttttttggcggccgcctacccgggagttgggagcgcgctgggacgccggactaagcgggcgcaaagccccaagggtagccctctcgcgccctccgggacctcagtgcccttctgggtgcgcatgagcccggagttcgtggctgtgcagccggggaagtcagtgcagctcaattgcagcaacagctgtccccagccgcagaattccagcctccgcaccccgctgcggcaaggcaagacgctcagagggccgggttgggtgtcttaccagctgctcgacgtgagggcctggagctccctcgcgcactgcctcgtgacctgcgcaggaaaaacacgctgggccacctccaggatcaccgcctacagtgaggracaggggctcggtcccggctggggtgaggggagggggctggaagaggtgggggaagggtagttgacagtcgctctatagggagcgcccgcggacctcactcagaggctcccccttgccttagaaccgccccacagcgtgattttggagcctccggtcttaaagggcaggaaatacactttgcgctgccacgtgacgcaggtgttcccggtgggctacttggtggtgaccctgaggcatggaagccgggtcatctattccgaaagcctggagcgcttcaccggcctggatctggccaacgtgaccttgacctacgagtttgctgctggaccccgcgacttctggcagcccgtgatctgccacgcgcgcctcaatctcgacggcctggtggtccgcaacagctcggcacccattacactgatgctcggtgaggcacccctgtaaccctggggactaggaggaagggggcagagagagttatgaccccgagagggcgcacagaccaagcgtgagctccacgsgggtcgacagacctccctgtgttccgttcctaattctcgccttctgctcccagcttggagccccgcgcccacagctttggcctccggttccatcgctgcccttgtagggatcctcctcactgtgggcgctgcgtacctatgcaagtgcctagctatgaagtcccaggcgtaaagggggatgttctatgccggctgagcgagaaaaagaggaatatgaaacaatctggggaaatggccatacatggtggctgacgcctgtaatcccagcactttgggaggccgaggcaggagaatcgcttgagcccaggagttcgagaccagcctggacaacatagtgagaccccgtctatgcaaaaaatacacaaattagcctggtgtggtggcccgcacctgtggtcccagctacccgggaggctgagttgggaggatcctttgagccctgaaagtcgaggttgcagtgagccttgatcgtgccactgcactccagcctgggggacagagcacgaccctgtctccaaaaataaaataaaaataaaaataaatattggcgggggaaccctctggaatcaataaaggcttccttaaccagcctctgtcctgtgacctaagggtccgcattactgcccttcttcggaggaactggtttgtttttgttgttgttgttgtttttgcgatcactttctccaagttccttgtctccctragggcacctgaggtttcctcactcagggcccacctggggtcccgaagccccagactctgtgtakccccagcgggtgtcacagaaacctctccttctgctggccttatcgagtgggatcagcgcgggccggggagagccacgggcaggggcggggtggggttcatggtatggctttcctgattggcgccgccgccaccacgcggcagctctgattggatgttaagtttcctatcccagccscaccttcagaccctgtgctttcctggaggccaaacaactgtggagcgagaactcatctccaaaataacttaccacgctggagtgagaccacgaatggtggggaggggagggtcccacggacatattgagggacgtggatacgcagaagaggtatccatgtggtggcagccgggaaggggtgatcagatggtccacagggaatatcacaaactcgaattctgacgatgttctggtagtcacccagccagatgagcgcatggagttggsggtggggggtgtcaaagcttggggcccggaagcggagtcaaaagcatcaccctcggtcccttgttctcgcgtggatgtcagggccyccacccaccgagcagaaggcggactcaggggcgctccagggtggctcgagctcacacacgctgagtagacacgtgcccgctgcaccctgggtaaatacagacccggagccgagcggattctaatttagacgcccgcgaacgctgcgcgcacgcacacgtgtcctcggctcgctggcactttcgtcccgccccctccgtcgcgtgcsggagctgacccggaggggtgcttagaggtatggctccgcggggtcaaaaggagaaggatcagtgagagaggcatccccacaccctcccctagaactgtcctttccccatccagtgcctcccaaatctctcttagtccccaaatgtatccccgccctaaggggcgctggtgggaggagctaaatgtgggggcggrgctcggagtccagcttattatcatggcatctcagccagggctggggtaggggtttgggaagggcaacccagcatcccccgatcccagagtcgcggccggggatgacgcgagagagcgtggtcgcccccagaaggccctgggccatcatgccggcctccacgtagaccccaggggtcgctcactcctgccagctcgccttcaccaaggccaggagcttagcgcacgctcgcctcccgcccccccgccgcctctgccgccgccccctccttggaaaccaagttaccaacgttaaaccaatccccaagcgcaactctgyctcccccacaccccacccgccgcgccgcgcggagccgtcctctagcccagctcctcggctcgcgctctcctcgcctcctgtgctttccccgccgcggcgatgccagggccttcgccagggctgcgccgggcgctactcggcctctgggctgctctgggcctggggctcttcggcctctcaggtaagagcyccgctctggttcggggtggacagggcgggggcggagtccctggacctgagaaacggcctcctgtccctcccagctctgccctcgcctcgctsccacgcctctgcccccacctcgagcctgagtcttctccccttccccctcctccccaacacacacccgagccccagcttcctgactcctcgatagcccctacccgcttcgagatcctaggtgttcttccgcacccaacccttcgccctggagacccagtgtctctcctgtccgctccccgggtacctccttacgctstgctgtgcaccatggtccacgractggcatcttccccactcgcggtccgcgaagactccatctctccaactaccctgactcagaggcgctgttcccgctccacccagarccctggcaaccgggtccctcagctgttcccgcggttccttccatgagcccagccttgcgtcccggckccgtgttcttcaccgggtgtagggtccttcctgatccttgacccagcctcgtctctcctttgcccttgccgcaaacgcactctcctcgtatcccggcattctgccaggaccctgagaactggttcatcccccatcccccatcccgggtccccttctctcagccttgctgtgttcatccaagaacccacctttcctctcctctacgccctccccccatgctttcccgccgctccatcggcgctttggagaccatgsctctctgctaccacgtcccagagacaccctcgaggtttagactctgggagtgcgcctttaaaccggaggcctgggcasgacgcgggacgcctgggttctttccctggctgsagcctctcctcctcctccccgccctctgagaacccttgactcgacataggggcgctaagatgtcagggagttggctccccaggctcagcccgcgtttccctgggcagcggtctcgcaggagcccttctgggcggacctgcagcctcgcgtggcgttcgtggagcgcgggggctcgctgtggctgaattgcagcaccaactgccctyggccggagcgcggtggcctggagacctcgctgcgccgaaacgggacccagaggggtttgcgttggttggcgcggcagctggtggacattcgcgagccggagactcagcccgtctgcttcttccgctgcgcgcggcgcacactacaggcgcgtgggctcattcgcactttccgtgagttctgggtggccacgcgcgtactccactactctccctccctcccaggccccgccccctgggtcccagggtcctccccttcaggccccaccttctgttccaagtcccggygttcaaagagctgcggactcttcccccttgcagagcgaccagatcgcgtagagctgatgccgctgcctccctggcagccggtgggcgagaacttcaccctgagctgtagggtccccggcgccgggccccgtgcgagcctcacgctgaccctgctgcggggcgcccaggagctgatccgccgcagcttcgccggtgaaccaccccgagcgcggggcgcggtgctcacagccacggtactggctcggagggaggaccatggagccaatttctcgtgtcgcgccgagctggacctgcggccgcacggactgggactgtttgaaaacagctcggcccccagagagctccgaaccttctgtgagtgggtgtggggaggagatggggacccagtggggtcggtcggtgtttaggaggtttagaggtagatacatctgaatgctgaccccgacttcaaccctcgccggctgagctgtttccccctccgtgccttgaggrkgataatacgataagatagtgcatgtcaagtgcttaggacatattgagcgctcggagttagttcaaacttggttcttcgacccctagccctgtctccggatgccccgcgcctcgctgctccccggctcttggaagttggctcggaaaggcccgtgagctgcactctggacggactgtttccagcctcagaggccagggtctacctcgcactgggggaccagaatctgagtcctgatgtcaccctcgaaggggacgcattcgtggccactgccacagccacagctagcgcagagcaggagggtgccaggcagctgrtctgcaacgtcaccctggggggcgaaaaccgggagacccgggagaacgtgaccatctacagtaaggaaggaggcggggtctccgcggctccgaggtgggaccagaggaatgcgaaggcggggcgaagagtgggcgggacctcagtaccggaacaggcgtgkcccgaggggcggggcaggtgggggcggagacgtaatcgctggggaggaggagcctgtacagcctgagaggcggggcgccgtaccctagttcgttctcagcaccccgaggattcgggcagataaggggcgggccttgaccggagggaggggtatggtcagtatactacgaccaaatgctccgcccccaggcttcccggcaccactcctgaccctgagcgaacccagcgtctccgaggggcagatggtgacagtaacctgcgcagctgggrcccaagctctggtcacactggagggagttccagccgcggtcccggggcagcccgcccagcttcagctaaatgccaccgagaacgacgacagacgcagcttcttctgcgacgccaccctcgatgtggacggggagaccctgatcaagaacaggagcgcagagcttcgtgtcctatgtgagttggtgataacccctcgccccccaccttctggtgacttccaaggacccgcctgctycctcaccgtgtcgtggaggcggagccatttcttacgtctaagcctctgtaaccccacgccctgcccgcagacgctccccggctagacgattcggactgccccaggagttggacgtggcccgagggcccagagcagacgctgcgctgcgaggcccgcgggaacccagaaccctcagtgcactgtgcgcgctccgacggcggggccgtgctggctctgggcctgctgggtccagtcactcgggcgctctcaggcacttaccgctgcaaggcggccaatgatcaaggcgaggcggtcaaggacgtaacgctaacggtggagtgtgagtgggggtgcgcagrgtgcayttctatctggttcaaggtctggagggtggccagcctccagggaagagtaggagtagggtatgaggtgtccctttgggtgaggttttgggaaagggaagaggctggttagtggggttggagaaagatcttggaggatggaagggaccgggtgggcgtgcccctagcctagggcgtggtatttgggcggagtcgtggaaaggcgggcagtccagagtgtttaagtttttagrcgaaaaaggcgccactggtggctcaggaagctcccagacagagtgcatgsctcgactagcgtgacacctccttggatcggcgtccaagggttatgcagggacaacacttcgtggaagccttgccgcgccaaggagggtctagggacgtcagatttgcccccaaaccccaaagccaacaatacactccctcctccagacgcaccagcgctggacagcrtgggctgcccagaacgcattacttggctggagggaacagaagcctcgctgagctgtgtggcgcacggggtaccgccgcctgatgtgatctgcgtgcgctctggagaactcggggccgtcatcgaggggctgttgcgtgtggcccgggagcatgcgggcacttaccgctgcgaagccaccaaccctcggggctctgcggccaaaaatgtggccgtcacggtggaatgtgagtaggggcaccgcggagttaggcaggatctgtgggacaaccccggctggacttcctggcccccgtgtgagcccctgcaatcctgtttcccagatggccccaggtttgaggagccgagctgccccagcaattggacatgggtggaaggatctgggcgcctgttttcctgtgaggtcgatgggaagccacagccaagcgtgaagtgcgtgggctccgggggcrccactgagggggtgctgctgccgctggcacccccagaccctagtcccagagctcccagaatccctagagtcctggcacccggtatctacgtctgcaacgccaccaaccgccacggctccgtggccaaaacagtcgtcgtgagcgcggagtgtgagcgaggcccaggcgggtagggagcaggggtgccccacggtccaggcactccctgacatcccccatggctgytttgcagcgccaccggagatggatgaatctacctgcccaagtcaccagacgtggctggaaggggctgaggcttccgcgctggcctgcgccgcccggggtcgcccttccccaggagtgcgctgctctcgggaaggcatcccatggcctgagcagcagcgcgtgtcccgagaggacgcgggcacttaccactgtgtggccaccaatgcgcatggcacggactcccggaccgtcactgtgggcgtggaatgtgagtgggggcagcaccggatggaggggacacggtcctcggaagaatgactcgcagcggtgggagcattcaagggcacctctcccaatcccattctcggggacagggaattccagcctaaaccagggggtaatgaaaattctagccaggcgcagtggctcaggtctgtaatcccaacactttggaaggttgaggcggatgaatcacttgaggccaggagttcgagaccagcccggccaacatggcgaaaacccgtctctacaaaaattagccggtcgtggtsgtgggcgcctgtggtcccagctacttgggaggctgaggcaggagaatcgcttgagcctgggaggcagaggttgcagggagccgagatcccgccactgcactccagcctgggcaacagagtgagactctttcttagaaaaacagaaaaagaaaattatagggaataggagcacggccctcctcaaatcctggattagaacactgacctgggcttcacctccttccattcggtgaagaagggcgaggaattttagccgcaacagcagyctgattgtcggggaaggaggctctgataggaggcaggatcctcttctgcccatcagaggcgcggtggtctcccatcgatcgttgtgggccggagcagggcatttgatcagtggctgggccggcgctaagccccacttcaccttctgtgcccttcagaccggccagtggtggccgaacttgctgcctcgccccctggaggcgtgcgcccaggaggaaacttcacgttgacctgccgcgcrgaggcctggcctccagcccagatcagctggcgcgcgcccccgrgggccctcaacatcggcctgtcgagcaacaacagcacactgagcgtggcaggcgccatgggaagccacggcggcgagtacgagtgcgcasccaccaacgcgcacgggcgccacgcgcggcgcatcacggtgcgcgtggccggtmmgtggcagctggggagaggcggggcgaggtatctgagagggggcgtgacctgggtcttggggcggccggccccgcctgcctccctctcggtcccggkagactagrcggwagtgggacagartagaagtcaaaggtgccttagcgggtggggctgttgatcgcactttgaggggtgggagatggaggtggcagggggactgaattcaaggggagggaccctccggggctgtcactgctgcaggaaaggactttaaaacttgggctggattctgcgtggyggaaacttgacccaattcacaatccactgtggggaagattggggagggaccaaagtcattggatgwtggagggagagaggggtcaagatcgccttctctcacttcctgaagctcctggggctgggttctctctggggtcgggggaacctgacctggtcctgccggtcctcattttttgggggatggggagagttgacttgtcgccagggggctaagtgtggtcacgggtttatatccccatgggctgaagtgcgatataaatcgggactcgggtcgccctggcactgggagtggccttattgcatgggttgtctcccttctcccaaggccagacagtgagctccccggggcatgaggactgacttcgtgcctgtgggagtgcggggggcggtgggagaagccccccggagcttggccaccctccgcgagggtctccaccccgcaggtccgtggctatgggtcgccgtgggcggcgcggcggggggcgcggcgctgctggccgcgggggccggcctggccttctacgtgcagtccaccgcctgcaagaagggcgagtacaacgtgcaggaggccgagagctcaggcgaggccgtgtgtctsaacggagcgggcggcggcgctggcggggcggcaggcgcggagggcggacccgaggcggcggggggcgcggccgagtcgccggcggagggcgaggtcttcgccatacagctgacatcggcgtgagcccgctcccctctccccgcgggccgggggacgccccccagactcacacgggggcttatttattgctttatttatttacttattcatttatttatgtattcaactccaagggcgtcacccccattttctasccatcccctcaataragtttttataaaggaactccctgtctccgcttctgtttctgcaaggtggaacaagsccagggttccagtcgtgacctcccgagttattcattcaawaagcgatttttgagagggcctggggtggtggcttaggcctgtaatcccaggacttgtgggaggcccaggtgggaggatcccttgcacccaagagtttcagaccagcctgggcaacatagggagaccctacaaaaaatatttttcaaaaattagccaaggccggtcgcggtggctcatgcgtgtaatcccaggactttggaaggccgaggcggccagatcacgaggtcgaggtcatgagatcgagaccatcctggccaatatggtgaaaccctgtctctactaaaaatacaaaaattagctgggcatggtggtgcrcgcctgtagtcccagctattcgggaggctgaggcaggagaatcgctttaaccccggaggcagaggttgcagtgagccgagatcgtgccactgaactccagcctggcgacagagcgagattccgtcttaaaaaaaaaaccaggcgtggtggctcacgcctgtaatcccagcactttgggaggccgaggcgggcggatcacgaggtcgggagatcgagaccatcctcgctaacacggtgaaaccccgtctctactaaaaatmcaaaaaaaaaaaaaaaaaaaaaattagccgagcgtggtggcgggcgcctgtagtcccagctactcaggaggctgaggcaggagaatggcatgaacccggggagcagagcttgcagtgagccgagatcgcgccactgcactccaccctggcagacagcaagactccgtctcaaaaaaaaaaaaaaaaattagccagggccgagcacagtrctctcgcttgaatcccagaactttgggaaactaaggcggggggggggggtcacttgaggtcaggagttcgagaccaccctggccaacgtggtgaaacaccttctctaccaaaaatacaaaaaaattaaggccgggtgaagtggctcacgtctgtaatcccagcactttgcgaggctgaggcgggcggatcatggggttagaagatcaagactgtcctggctaacatggtgaaaccccgtcactamtaaaaacacaaaaattagccgggcgtggtggcacatgcctgtagtcccagctactcaagaggctgaggcaggagaatcgctttaaccccggaggcagaggttgcagtgagccaagatcgcaccactgcactccagcctgggcaatagagcgagactctgtctcaaaaaaaaaccaaaaacaaaaacaaaaaaatacaaaaatttagctgggctgtagtggcacacgccctgtaatcccagctactcgtgaggctgaggcaggagaattgctagaacccgggaggtagagatcttgccattgcactccagcctgggcaacagaactagactctgtctcaaaaaaaaaaaaaaaaaaaaaaaagtgttttttgagggggctgggcatggtggctcaagcctgtaatcccaggacttttgggaggcccaggtgggaggatcccttgtgcccacgagtttcagaccagcctgggcaacatagcgagaccctacaaaaaaacatgtttcaaaaaaaaatttttttttttgagatggagtctcgctctgtcgcccaggctggacagcagtggcactatctctgctcactgcaagctccgtctcccgggttcatgccattctcctgcctcagcctcccaagtagctgggattacaggcgcctgccaccacacccagctaatttttttttgtatttttagtagagatgggatttcaccgtgttcgccaggatggtctctattcctgacctcgagatccacccgcctcagcctcccaaagtgctgggattacaggcgtgagccaccgcgcccggcctcaaaaaaaaaattttttttttgagatggagtcttgctctgtcacccaggctggagtgctgtggtgtgatcttggctcactgcaacctctgcctcctgggttcaagcaattcccctgccttggcttcccaaatagctgggactataggcatgcaccaccacacccagctaatttttgtatttttagtagagacagggtttcaccatgttggccaggctggtctcgaactcctgacctaaggtgatccacctgcctcggtctcccaaagtgctgggattacagctgtaagccaccatgcctggtgtatttttcaaaaattagccagacatggtggtgcatgcctgtagtcccagctacttgggaggctgaggcaggaggatcctttgagcctaggaggtcaaagccacttccagctatgatatygtcattgtgctccagcccaggtgacagaaccagaccctgtctctaaaaacaaacaacgaaaaaatccaaaaactttttttgaacacctactatgcatcaggcacaatctaagctgtctttttctttttcttttttttttttttttgagacggagtctctctgtcgcccaggctggagtgcagtggtgtaatctcagctcactgcaagctctgcctcccacgttcaagcgattttcctgcctcagcctcctgagtagctgggattacaggcgcgcgccaccactacgcccggctaatttttgtatttttagtagagacagggtttcaccatgttggtcaggctagtctggaactactgacctcgtgattcacctgcctcggtctcccaacgtgctggaattacaagcctgagccactgtgcctggcccggctggctgtcttttctcagtgtgacctagagctcgtcctctctcagtgcctgttttctgctctcttcacacccttgggcaggggtgggggcctcactccttcctcctacttatctcttccacccagcactgccctctgatccgggtcactcttggaggtgggggctaggtgcttcccccaggcctggttaccggcagagctgaggccgccttgccagggtgggtggaggccctctccgttgtgcccctgccctgagacttcggtgagaccttcctgggcaggcactggctgatgctatgggtgtcagcccttagcatgtcctccctgttaaagggggcacccctgccccgccctcaatgcctcctttgtcctgtgtccacccacagtgcttcagtttacccccaccctgcctttccactcagcccatcatgattcagaacagacacacacagggtatccgctgcaacccccactacacggcaccttcccccctcatccccaacagcataaggcacagcagctgggcctcctccccacagcctcctcctctgcccctcctccctcaaaagcaggaacacggagccctagagaaggaagccagtcccatgcaaacatgtaatgagcaaagatgagacggggaaatggcacaagagggcaggccagtgctcggtgctggagccaggggccaggtataacacccaaaaaggcaccagccaggtgcagtccctgccactaacagcacctcaccttttctgcctgtgccctccctacttaatgatctctctccgctcctactgacctcaaggtctctttcagagccttcagatgagatatttattttagtaggttggtgcaaaagtaattgctgtttttgccattgaaagtaatggcaggcagggcatggtggctcacgcctgtaatcccagcactttgggaggccgaggtgggcagatcacgaggtcaggagttcaagaccagcctggctaacatggtgaaaccctgtctctactaacaatacaaaaaaaattagccggacatggtggcacacccctgtagtctcagctacttgggaggctgaggcaggagaactgcttgaaccctgaagcggaggctgcagtgagctgaaatcacgccactgcactccagcctgggccacagagtgagactgtctcagaggaaaaaaaaaaaaaaaaagtaatggcaaaaactgcaattactttttctttttctttctgtttttttttttgtttgtttgtttgtttgtttgtttgtttgagacggagtctcactgtgtggcccaggctggagtgcagtggcgcaatcttggcttactgcagcctccgcctcccaggttcaagtgattctctcctgcctcagcctcccaataggattacaggcacccaccactatgcctggctaatttttgtatctttagcagagatggggtttcaccatgtttgccaggctggtctcgaactcctgatccacccacctcagcttcccaaagtgctgggattacaggcaggcatgagccatggtgcccgacatttttttttttttttctttttttttttgagacagagtctcactttgtcacccaggctggagtgcaaaggcaagatctcactgcagcctctgcctcctgggttaaagcgattctcccaccttagccccctgagtaggtgagattacaggcacatgccaccacacctgcctaatttttgtatttttaatagagagggggtttcaccattttgtccacgctggtctcgaactcctgacctcaagggattcgcccacctcagcctcccaaagtgctgggattacaggcatgagccaccacgcccgacctccttaactcttttatttccttgcacactttttctctgtagcccagctcacaacttaacatcctcttagacatacacctgaggttttttttttttttttttttgagagggagtctctctctgtcacccaggatggaatgcagtggtgtgctctcagctcactgcaaccttgcaaccactgcctcccaggttcaagcaattctcctgcctcagcctcccgagtagctgggactacagacacatgccgccacacctggctgattttttgttttttagtagagacagggtttcaccgtgttgcccaggctggtctcaaactcctgagttcaggcagtccgcctgccttagccttccaaaatgctgggattacaggcatgaggcaccgcgtcctgcctctgagttttttttttttttttttttttactgtctcctagaacatcagccccagtagagcagggatctttgttctgttcaccactgagggtcctcattgggtcctagcacacacagttgctcaataaatgttgaataagtgggtaaagacagccacgagcttgcagatatgtgttcaaggtgtgtccttgcagagagcttctctatacttggcactggagaggcctgtcgtgggcaaggacatagatgtggcgacctcagacttgagaactcctggggcagtaggggagatggatgtggataatgtaaccataagccttcctttctattttagactgagtggtcaaggaaggcttccagacaatggaaattctgataggttctaagagggagaccagcaaggagctgaaccggaggctgacacagggtgagagtgggaatgtctattttattttttttttggagacagggtctcactctgttgctcaggcagcagtgcagtggcacgatcgtggctcactgcagcttcaacttcccagactcaagtgatcctcccacctcagcctcccaagcagctgggaatataggtgcatgccaccacatccggctaatttttgtatttttggtagaaacggggtttcaccatgttgcccaggctggtcttgaactcctgggttcaagtgatcttgctgccttgggctcccaaagtgcttggattacaggtgtgagcctgtgagccacatctggcctattttattttttaattagttttttgtttttgtttttgttttgagatggagtctctgtctccaaggctggagtgcagtggcacgatctcggctcactgtaacctccacctcccaagtagctgggattacaggcacatgccaccacgcctggctaatttttgtatctttagtagagacagggtttccccatgttggccaggctggtctcgaactcctgacctccggtgatccacctgcctcagtttcccaaagtgctgggattataggaatgagccactctgcctggctgggcatgtgtcttgtttttttcattctgtagataacaagcaattgtcctccctcagcctcccaagtagctggtactacaggcgcctgccactacgcccggctattttttgtagttttagcagaggtggggtttcaccatgttaaccagtctctaactcctgacctcaggtgatcctcctgccttggcctcccaaagtgctggaattacaggtgtgagccaccaagcccagcctcaaactcctgagtttaagtgatcctcacacctcagcctccctgagtgctgggattacaggtgtgagccaccacacccggcctgagtcgggggaggtgtctattttagtctgagtggtcaaggaaggcttctctgaagagctgatgttggggccaggcctcctcaagcgattagaaggtgtcagccatggggagatgtggagggagggtgtttcaggccaaggaagggtaagatcaaataattcagggatctgagggcagaggaatctggactccagttctcccattcagggctgcccaggagagacaaagaggatctcataagggtgtgtggctttgtggctcactcacgcccacagcaaggaccatgcccaccctacttttttttttttccccaagtctccctctattacccaggctggagtacagtggtacgatcacggttcactgcagtcttgacctccagggctcaagtgatcctcccacctcagtgtcctgagtagctggcactacaggcatgcaccaccacccctggctcattttttgattttttggtagagacggggtctcactgtgttacccaggctggtctcaaactcctgggctcaagcgatcctcccacctctgccttctgaagtgttgggattacaggtgtgagccaccatgcccagcccgccaccagtcttgactctccatcctccctccctccctgtgagtgctggtggcctgtgtgtcccgcctgctgaaagatgcctctgacttggggcttttgacttcaggcccgggagacacattttggctggattagggagatcttaaaagggggtaggggacacagcaggggctaaggagagtgacacactgcaggcaggggttgggtgacagatgaaggatccactggtatatgctgccagtgtgtgccatctacttgtgtgttttacgtgtgtctggtgcatgtgtcctgtgtgggctgtatctgtgtgtgactcagctacgtgtcagcatatccctgtcgacgtgtgtctctgctgatgtgtctgtcagcacgcacggctgtcttgcatgtgtcttttttgagatagagtctcgctctgtcacccaggctggagtgcagtggcacgatcttggctcattgcaacctcaacctcccaggttcaagcgattctcctgcctgagcctcccaagtagctcggattacaggcacatgctaccacgcctggctaatttttgcatatttagtagagacggggtttcatcatgttggccaggctggtctcgatctcctgacctcaggtgatccacctgcatcagcctcccaaagtgctgggattacagaaatgagccactgtgcctggctagacatgtgtctttttttttcccttctgtatataacagggtctcactatgttgcccaggctggtctcaaactcgtggcctcaagcaatcctcctgcctcagcctcccaaagtgttgggattacaggcgtgagccactgcacccggcttgtgtgtgtctttctgtatctgttgtgtgtgtctgtgggtagtggctgtttccctgcatgggacattgtggtaaatgtggctaattccctgtgtgggggctgctgcctgtggataagactgtgtctctgtgcatgcgcacgtgtgtgcacgcccctcacaaccccaacgagaaaacacctgtccaccttcctgggctggcacaggggcacaggaggcgggatcccaaatcacaggctttttctctcggcatatctctgtactttattgtccctgctgtaacaatgctcatccttcctgagagcgtctcctgagggggcctcggccaaggctgactggagaaggggctggtgacccctagcaggctctgccacctgaggcctgggtcttcccccgggatccttgaatctggagatggcagagaggaggcaggccggctctttccccaatcctcctaggagagctgcttctgcccattctcccactggtgaaacggaggcagaagcagcagctcagcagggtgaagctgggtttaaccttcctgaayggggtccagggacactccacatctgccacatagcctcttgggctggacatttttcctgggcaccagccagcagctggagcagcgagtgccgtatttcttgtacctagggttgggggacaagaaactgccatttaggatgcagtgggggcccggaaaccgccacaaggaaaccacttttcccaagaggtaggtgttttgctttttgctttccccacaggccatcctggttacacgtggactgatttggggacccccgccccaactccctcctccattctaaggacctgatcccacaggcgttgcagagaggggtcccatcttcagcgtctctccagagcggggtcctctgggtccgacaggaagcacagcgccggggctctgaagggtcagaggtcaaagggcaggggtcagaggccaagcatgtgagctcgggatgcctgtgcggagtcgggcattttgtgggggtctcagtaaaggccccacctagctctggatcagccctgggagttgccagctctaagccacagcaaagccaggaagggagacagatggcagcattccgcagaggaggaagctgggggtgggggtgactcagcccaagtggaggggggtgctgcgactcctccctgagggctctaaatggggaagcaagatggagaaggggggggcagggagaaaggcagggaagacaggaaattggcccccaaaatatttatagctcttgggttttcaggactcacccagggcctcgctgcctgctgagtgggcctcggtgcctcctgggtgggctgcagggcccccaacagcatctgcaggggattcctgagaacggctactgcagggcaggctgtggggcagacaaggtattagcactgggggggatctgtagcttgtccccaacagccctccgaaatgaagatttagtatcaaggtatcagccatcccccgaggaggcaactaatatctgaatggcctggctttgcctctcattagtaatattattattattattattattatttttgcagatggagtctcgctctgttgcccaggctggagtgtagtggtgtcatctcagctcactacaacctccacctcccgggttcaagcaattcttgagcctcagcctcccaagcagctgggactacaggcgcgcgacaccacgcccagctaatttttgtatttttagtacagacggggtttcaccatgttggccaggctggtctcgaactcctgacctcaagtgatccacccacctcggcctcccaaagtgcagggattacaggcatgagctaccgtgcccgacctaattattattattattatttgaaaaatagtaagcacagggacagcctgccaggttccaatcccagttctccatgtccttgctgtgtgagcctggacacattatctcctactctgtgcctcagtttcctcatctgtaaaatgggcttcccaatacaacagtttttttttctttgaaaatttgatttattgatttttaaaaagagatgggagtctgggcaatatagggagaccccgtctctacaaacaaaaaaaatagccaggagtggtggtacaggcctgcactcccagctagttgggaggctgaggagggaggatggcttgggcctgggaggtccaggctgcagtgagccatgattgcgccactgcactccaccctgggtgacagagcaagaccctgtctcaaaaacaaacaaacaaacaaaagcaaaaaaaagcagccaggcatggtggcggctcactcctgtaatcccaacactttgggagggcaaggcagatggatcacctgaggtcaagagatcgagaccatcccggccaacatggcaaaaccccatctctactaaaaatacaaaaattagccaggcgtggtagcaggcacctgtaatcccagctactccagaggctgaggcaggagaatcgtttgaatccgggaggcagaggttgcagtgagccgagattgtgtcattgcactccagcctgaacgacagagtgcaactccatctcaaaaaaaaaaaaaaatattgttttggcggcatgattaaaaaagtcataattataatttttataataacaataaataggtaaaaattagagctgggggtcatactatgttgcccaggctggtcttgaactcctgggctcatgcaatcctcccaccttggcctcccaaagtgctgggattacaggtgtgagccaccaggcccagcttcccaaagcttttttttttttttttttaaggggatggagtcttgctctgtcacccaggctggagtgcagtggtgccatctctgctcagtgcaacctccacctcctgggttcaagcgattctcctgcctcagcctcccaagtagctgggattacaggtgcccattaccattcccagctagttttttttttttttttgagactgagtcccactctgtggctcaggctggagtgaggtggcgctatctctgcttactgaagacttcacctcctgagttcaagcgattctcctgcctcagcctcctgagcagctgggattacaggcacccactacaacgcccagctaattttttgtatttttagtagacatggggtttcactatgttggccaggctgatctcaaactcctgacttcaggtgatctgctcgccttggcctcccaaagtgatgggattataggcgtgagccactgtgcccggcctccccaggcttttgaatgagcccatacacataaaatactgcctgttaacctcttattgttgtcactaccaacaaatagtagctgttagcattattgggaaaaatcaccgcagccgcagctgcagcctaagcaaggccaggcctgattcctaaagagaccaggtctcacattgggagtggggagccactgagtcaggagcggcaggactgtatctggcaccagctcaagttgtcaaccagagactgggccacgtgtaacgtagagcacaggtgagggtccacaccgacgccagrgagcacccctacctcccacactggtgtttgcgttgtaactgggagaaagggcggcctggccccagccggcccctacctgtacgtggggatgatctgcaggctggagtccggctttatctgaaacttcagagtcaccccctcgaacccagggtccactctctcggtgccccggcaggggttcagctgtttccggggccttctctggggtggggccgagggagtccccgggggctgcagacggcggcccttttggctgatcctggtctgtgtgtccttggaatccctgtccagcagcaggcggccctgagtccccagagccatcgggtcccagcaaggccccaggacyggggtgtcctgggcaggggactgacccagcctctccactgtctcttggaggaagcacagggcggtgaccgactcctggcatgcaggccagagggacctggggagaagggcagtggggtcacgttttcttgggtgactcctgggtttagccggccagggggttccaacttgggccggctctttgtgtacccttggacaggctacacaccccacctgaggttcagtcatttctaactctgggtggaaggtttaagagttgcagtaattgcaactcacctcgcccactgtgggcctcccaggcacgcccagccctccacatcaatcaaccccttacggcacccgtagatcacccaggcagggaccgccctaggtgaccgaggcaggatatcaagcctctggctgcaggatcgagaaaaaggttactttttttctttgtgtttcttttagagaccgagcctcactctgtacccccgcctggagtgcaggggcgtgatcaggactcagtgcagcctagaactcctgggctcgaccgatccttccgcctcagcctcccgagtagctgggacttacaggcacgcgccaccacgccgctggcttgccataatatgattacgatttttatcattttcattattattgagttgccctccataacccctggatgatccctggggagtgcctacatcagccccagagacatggaattgcatggcctctgatccctagatgaccccaagtgtctctgggcaccagaacctctttgtaagtttcagtaactattataaaattgccacttctcgataaccccagcaaagagaggtcatraccccttgatcactgagccaggtggtgaagtgctagcggggtccggggaatggggtttggccttacgcacctctcactgattctgcagcatcctggggtcctcggcttctcctgggagggggatcctcccagccgctccaggttcagacagggcggcgccagaagctttgctggcattgaggagtccgggattggctcggcctccattgcgccccagcccagccccctccctaatttcacccggccctgtcccgctgggcccacccgatgaaacccacctgggaggggcgggacctgtgtggtgggagcgctcttggtagaggatgcgatgagccccagctgagagcgaccagcctcggcggcacctttcctctttctggcttttttcaggtcatccgcgcacccctgcgtggcaagggcggcctggaccccaccaaatccctccgcagctgccggggcggggccttccacgctagccctccccctcggaaatgggggctcccaggcctctgccttggatccccagcggcatcttagatcccagagggaaaagagaaccgggggcccagcacagcagatgcaggtgtggtttgtttttgtttttgttttttttttttttgagacagggcctcactctgtcacccaggctggagtggaatggcctgatcaccgctccactgcagcctaaatcccctgggctcaagtgatcctcccacctcagtctcccgagtagctgggactacaggcacttaccaccactccacgctaatttttactgtttttatagagacgaggtctcgccatgttgcccaggatggtcttaagctcctggcctcaagtgatcctcccatcttggcttcccaaagtgctaggattacaggtgtgagccacctgtagaccccagatctgtcccccaaggacactcaacatgctggggcctgtgttatcgatttattgcagctccaatatgagtccactcctactcaaaccctgattctcaggggcctggggaaggccaccccactaggggccctgtccccaccagagcctggacatgggactctctcccaagcaggggtgttgtccttcacaggggcttccacgtctctcccgggcctgtccgcactctgggcagggctggcacctggctattccctcaatctgggccctggggccatggcaatgtggaatggtccaggtgttcatgtcagtggggcttggggacatggccatccacgtagaagttcctggtgatcttgggmagggtgaattccgctccttccagctccggtgtcagcacaatctggcagcccagccgcgagttctcctggaggaggggggccatgtctagcatgtcgtcttccctagggtggtgacacgggcagtgttagccgagggcaagctagctgggtgggtggggggccagaggtsggggagggaggaagctgactgagcgcagggggtagtggtgggggaggcagctcccattccaggaactggaagtggggaggatggtgggggctgctgaatgctccagggtgaagctgccagctagacagggctgacccactcacctctcctcgggaggaggcaggagatccaggtggtcttcactcacatacacatggcaggtggagcaggccagggaggcttcacaggcccctaggggtgggaagtgaagggggcgcaggtgagtggcagagtcaggaaggggctgctatgcgaatggcgtagaggagtagacctctcttccaccacgtgcctcacgtctccctcctgggcctgcagctccactgtgtgtaccaggcactgtgtcatgtcctcaatgtcctcagctagctgttccccagtgtgtagggtttacaaacggacatctgggaggccccatttcccagggactccctagcaggctgagatgcagaaccattaaggagcagggacttggctgccaggtagctgagaggggaaaggccaggcaggctccccgcagtctgtgagcccttgctgtgaccctatcactgtgctgggctaatgtgtccccacctctccactgctcttggaggatggaccggctgactcagcagtcagtgtggtgggggaaggaatcaggcattaggattttgttttttttttttttgagatggagtcttgttctgttgcccaggctggagtgcagtggcacgatctcggctcactgcaagctctgcctcccgggttcacgccattctcctgcctcagcctcccaagtagctgggactacaggtgcctgccaccacgcctggctaatttttttatatttttttagtagagctggggtttcaccatgttagccaggatggtcttgatctcctgacctcatgatctgcccgcctcagcttcccaaagtgctgggattacaggcgtaagccactgcacccggccaggattttttttttttttttttgagacagggtctcactctgttgcccagcctggagtgccatggctcagtcatagcttactgcctcaacctcccggctcaagcgatcctcccaccccagcctcccgagtagctgggactacatgtgcgcaccaccacacctggctaatttttttttttttttttttttgaggtggagtttcgctctctttgcccaggctggagtgcaatggtatgatctcggctcaatgcaacctctgcctcccaggttcaagtgattctcctgcctcagcctcccaagtagctgggattacaggtgcccaccatcacgcccagctaattttgtatttttagtagagatggggttttgccatgctggccaggctggtcttgaactcctgacctcaggtgatccacctatctcggcctccctaagtgctgggattacaggtgtgagccaccgcacctggccatattttttttttttttttttttttttgtagagacgaggttcaccatgtggcccaggctggtctcaaactcctaagctcaagcaatctgcctgccttggcttcccaaaatgctgggactacaggcatatgccactgcaccagaccaggaattagggttgaaagagacagaacctgaagttttctgctgaccacctgcccttggtcacacccccacatcctctgatcacagagaccggtgcttggggatcatgtccctcctggcctaaaactttccaaagggttttcacactcagaataaaatccaaactccttcacttagtcttgcagttcccccatccccctcattcattcctttgttttcctttgtaatttttttcttagagatggagtcccgctctgttgcccaggctggactgcagtggcgtgatctcggctcactacaagctccgcttcccggattcacgccattctcctgcctccgcctcccagagcagctgggactacaggcgcctgccaccatgcctggctaattttgtttttgtatttttagtagagacagggtttcaccatgttagccaggatggtcttgatctcctgacctcgtgatccgctcgcctcagcctcccaaagtgctgggattacaggcgtgagccaccacaccttgccaggccacttacctctactagcccggcacagtggctcatgtctgtaatcccagcactttgggaggccaaggcaggcagatcaactgtggtcaggagtttgagaccaccctggccaacatggcgaaaccccatctctattaaaaatacaaaaacttagccgggcatggtggcagttgcctgtaatcccagctactcgggaggctaaggcaggagaatcacttgaaccctggaggtagaggttgcagtaagccaagatcatgccattgcagtccagcctgggtgatagagcgagactctgtctcagataaataaatgaacaaataaatctatctcacattccaatccctgtcctagactattggctgctggattccagaacagaactttaggtaggcctttcataacccctcccaacatatcttcccctttaatgataaaatcaggatccctgatatattcatcccaaaagcaaaccctatatattttcttccagacaacccttcccaagttggtcataattatgtatttacctgtgggattattgtccctattagaccgaaatggatgtgagatgacagaggccttatttgttttgtatattgctgcctgacgcgcagtaggtattcatagaaaggcagcacagattagtggctacaatggactggtgagtctagtattgtcactcacttgcccttagaccaggtctacttaacctggggtttagttgcctcatctataatagggaataacagtctctactactcaagttgtcatgaagattcagtcagtgaatatttattaacatggttaaagacatatatatatatatatatatatttttttttttttttttttttttttttttttttgagacagtctcactctgtcgcccaggctggagtgcagtggcgtgatcttggctcactgcaagctccacctcccgggttcatgccattctcctgcctcagcctcccgagtagctgggactacaggcgcccaccaccacgcccacctaattttttgtatttttattagagacggggtttcaccattttagccaggatggtctctatctcctgacctcgtgatccgcccgcctcggcctcccaaagtgctgggattacaggcgtgagccaccgcgcctggccttttttttttgtttgtttgagacagagtcccgctctgtcatgcagcctggagtgcagtggtgccatcttggctcactgcaacctctgcctcccaagttcaagtgattcttgtgcctcagcctcccaagtagctgggattatatgcatgtgccaccacgcccagctaatttttgtgtttcttgtagagacagggtttcgccatgttggccagactagtctcaaactcctgtcctcaagtgagtcgcctgcctcggcctcccaaagtgttgggattacaggcatgagccactgygcctggacaagaaatttctattattatttttctctcaacaaattatcaaacatctgttacatcttgacaggcaacagataagcatgaataaggacatgggtcaccaatctcactgggggacagatgacaaagtaggaaacaaaacagcctggcattgtggcttgtgcctataatcccagctacttgggaggctgaggtgggaggatcacttgaacccaggagttcaaggctgcagtgaggtatgattgcatcatggcactccagcattggcgacacagcaaggctccgtctcttgaaaaaaaaaaagtgagaagtgctatatatcatatcacactgataagacagagtaactagggcatgggtacttcagctgggctgaggggaatgggattgttagggacatgacatttacactgaggtctgaaggatgagaaagagccagaatgtttgctgggaaagcacttcagacagagggaacagcaaatgtaaaggccccgaagcaggaatgagcttggttgtttgaggaaccacaagaaagccagtgtgggctgggcgcggtggctcatgcctgtaatcccagcattttgggaggctgaggcgggtggatcacctttcaggagtttgagaccagcctggccaatgtggtgaaaccccgtctctactaaaaatacaaaaattagctgggcttggtggtgggcgcctgtaatcccagctagtctggaggctggggcaggagaaacgcttgaacccgggaggtggaggttgcagtgagctgaggtgcagtaagccattgcactccagcctgggcaacaagagtgaaactccatctcaaaacaacaacaacaaaaagaaagccaatgtggctagaatacagggaggaagggggaagagaacacaaaatcctgggagccaggagtcctagtgatctctaataaatgcttaacaaataagagcttggcaacagatgaggccatggtgaggggtttggattttagtccatatttggtgggaaaaagacgtgaagagacacacctratttgtggktttttttttttttttttttggacaaatgtataaggacctccttaattccctctgcccggttcctaccttccaggtccaccccgtggcgctgggccaggtgaagaacattgtccccgactctgccactcactgggatccgctggcctgagcggtctacgaacaccacgttcaccctggggacagatggaagtgcgaatgccgaactggatgatgggctcagggcccgggtagaatctagggttaggaagtaggaattgaggcttgacgcacaggtactgaatagggcaaagcagaagggggacctcgagatgaagctacagggcaagatggggaccagaggaattccgtgggatgaggaatgggggacttggccccctgcactcacacgtccccgggccgctccgggccgcccgcgtcctcctctccmgccgggcgcgagcctggaaaacacggttcggtgagcggctgcgccgagccccgccccgccggcatctgacggattaacgctgcccgccccgggcgccccaggtacctgtcgcttgaaactttctggttgtccccagcgccaccccctcccccgacccggaagtgcccccaggtctgttccaccaggtgcccctggcagcctgcagyagaaccctggcactcacgcctccccgggccatggaggcggccatgacatgcatcacgtgactcaccgactgagcatgcgccgcgccagggaggcgagggaaagcccataatcaatggaacataagcgcagatgtttgcttagggcctgcggtgaccaggtgggaagagcagggcggaatccatctcaggtaaacccgcggggccatcccagacctcccactcaagcccactgtttgtcccaagaaccagccaactctgatttctttaaaaccatttacttacaaactttaattcagcaaaggtccgtgtggggagactggggtggggtcgggggaatagtccccttggagtggatgtggacccccagagtcaagggagggaagctggtggcccagttggctgggggcaaggcccagggtcacctcaggtcgacaggtcctgctggtgggcgggcccagagtttatcttcatggagtgctggtttctggcactgggctggaaggaggccagctccagggatctggccgggggtgggcaggcagaattcaagaattcatcttcaacaagcgagtgacagcagaggctccgggagatgggcacaatgtccgactcccacakacagacagcaggggactggcagagaaagcccatctctgcacggaggcccgggtaggagggggtggtggggccggttcgccaagatgaaggctttccccttctactgtccccagggtggagatcctgggtagggtggcccaatccctaggccagagctgtttggtccatagtcaagctcccagagcttggcatctgtggctctggccagcagggcctggggcccagcttttaaggcatcagaaggggagggggctgcggcagggaccccgggccccacggctggggtataggccagatgggcaggcaggggcaggagacagccatgcctgcagcaaatgtgggaaaaacagctgtttcaaaccgcaaggtgtggaatggtggcccggacaggccgggccttgaaggaatcagagctgggggctgtccggggtggtttgaaaaataaaacttagaaaaggaaacagaagtcagttgtcaaagttaaaaaaaaaggagacagtctctgtatcttcacgggaggtcagggaaacctccaaggcactcgaaaggccaaaattacaggagcaatgaggcaggagggctccggagagacgggcacagcggaggaggagatggggggagggagggagagcaggccggggcccctctctcttaaggctgcagggtttcagcgtggggagcaagccagagacataatgaggcctccagactcccccacaccccttgggctcctggggctccggctgattggtcagtaaagtctttcagagatttttctattaccgaaagagagaaaatggtttaaaaaaaacacaaaacaaaacatcagaaaacccaaaagcgatttggtgcaggcccttgagttatctctggtgccagccacttagaaaatcctcttccgcttcaggtaggagtccgcgtagtggccgccgaggccctgggagtgctggcccacatagctgccttctgggctgggctcgggcgagggcagcaggtgggcaaagctgcgtttctggccgcccagtggggtctggagacagagggcagggcggggcgggtcaggggccgctggggggccggggcttcccagccctgcatgtccccaccccctgcccgtaccttcagcaggtggctgtgaccattaggcccggggctgaggcccaggagcccttctccggaccccagcggggaagagccgattgcctgggagaaatggagaggtggaacaggtcactccctgggggccagaggaagcacccaccccgcccccctgccactgccccccagccctgagggaaagcgaacagtttcaggttcaaatcttgcttctgctactttctagctataagacctagggccaattgctccattttatttgagcctcggttttctcatctgtcagatggggccagtagcacccacagcctgggctgtagagagaggaagtgacagaaagcccggaatgctggcagtgctaggtgcttgatgcagagtggatggaggacaataggctgttgctactccaccctgagcaagaccaacccctgccaccaccccagctttggcctgggcaccgagggttacagagccccggtggcaggcacccccaaatcctagctgtcccagggggcctgtgcttggccagagaggttcctcaccttactgaggtggctctgcttgaggccagcctgcaggccgctggtgaagtaggaagtgggcgagcctgaatagaagtgagacagggggcccccgccactcccaccgctgctccgttcgccgaagccactgggcgggggggacatctgtagaagaagggccggtggagtgaagcagacaattgtagtacccagccctttgtatacaatcttccctcygcctcccaggttcaagcgattctcctgcctcagcctcccgagtagctgggattacaggcatgcgccaccatgcccagctaattttttgtatttttagtagagacggggtttctccatgttggtcagactggtctcacactcacgacctcaggtgatccgcccacctcggcctcccaaagtgctgggattacaggcgtgagccaccatgcccggcagttctgggctttgcaaagactagctttggctaataggactgaggagagctggcacgtgggtacccgcctcctcttcctcctccaggaacccagggatcatcaccgcacgaatgggcacacagaaactgttccagcctgtggacgccaaatatgtgaggccacatagctcactgagacccaggtgagtgccggggaccgcccactgccccatagagtggcaagaagtaatamaatgcctggcatggtatggtggctcatgcctgtgatcctagcactttgggaggccaaagtgggaggattgcttgagcccaggagtttgaggccacagtgagctatcatggagccactgcactccagcctgggcaacacagtgagatcctgtcttaaaaaaacccacaaagaacacacaaaatacaaggtctgctgttccaggctactaagtcatggcacagcctgtcatgtagtaaaagctgattgctacacatgccataccaggtggctcttaccttgtgtcggctgggtccgtgaggcccaagggctggttcccgtgggtgggagaagagccgccgaggtcccatgtcctgaatgaaagcgggagaagcacattgggttggagtctgtcccagcctcacccctggctgaactccatggcagagctgtcatcagggaagacagtccccaccactctgggaccaggaagaggcaaatttggggctggatgcagcttggcagggatggctgctgtgaaggggggtgccccccatgggcctaagtgtttggagtttcccaggcaagctgggaattcgagctgtgtggactcttgcagttttcctgtgttggcgttagttcctgttgttatttgtttgaaacacagagggggccaaacatcacccaggtgacctgtgggcggccagtttgcaatttctttcttttttttttttaaacggagttttgctcttgttgcccaggctggagtgtaatggcacaatcttggctcaccacaacctccgcctcccaggttcaagtgattctcctgcctcagcctccctagtaactgggattacaggcatgtctaccacacctggctaattttgtatttttagtataaaacataaattatattttatattatatatgaaatatatattttattatatattttataatatataatttctccatgttggtcaggctggtcttgaactcttgacctcaggtgatctgcccgcctcggcctcccaaagtgctgggattataggcatgagccaccgtgcctggcccagtttgcaatttctgacctgccaaggaggttggcatcatagaaggaccaaatctccaggggcacagacaggaatcaaaggtgggagagagggatagaaagggcaagccctgtctctggggagagacagtgtggcctaagtcctcttgggagagaaagacagacgcaggatgacagacagactgagacccaagatcctccagggctcgagaatggacagacaggcaggtggaccggaagcagggggtgatgtgcagacagacgggaaactttaagggcatgaggctgggcgcggtggctcttgcctgtaatcccagtactttgggaggctgaggcgggtggctcacttgaggtcaggagtttgagaccagcctggacaacacaatgagactccgtctctaccacaaatttaaaaattagctgggcatggaggtgcrtgcctgtggtcccagctcctcaggagactgaggtgtgaggatcgcttgagcccaagaggttgaggctgcagtgagctatgatcgcaccactgcactccagccagggcagcagagggagaccctgtctctaaaaaaaaaaaaaaaaaaaagcagagaccatatctggcacgttccctgccgcctccctagcacatggcctggcatagtcaatcctagagaaatatcagtttggagaatgatttggccttaggggacagagagctgcagccaggcactcaccgaggggtagtcgaagctgtagctgtcagacagtcctggttcggggggcaggcgggcgctgctgagggggctgagcaggcgggacttgagctggaaggctttgctgctgctgctgccacctccaggggctggggggttagttggggggccctcagctgggcggcggcttctcccggcgcctccccagccccgggcctccttacccgccaggttgctggccgggagcaggctgtgtaggttcaggtagggattcaggggaatccggtagtccttggggggctcccccagcagtgagacctgtggcgggaaggcaggattcgagagggcccccgggagagggaaccctgcggaacaggaggctggtgtggtgccgcgcgcagggcagggccttaccccagggggcgtcggcagaggcccactgtctttctggaggcctctgaggccagagcctcggagccccacaggggckgggggaggagtgagctgggccgctgggggacccaagcccagggcctcccggtcacccccagcagggccaagcacggatggcagcaggggtggtggcttccctcgccggggcggcagctccgggggcaggccccctcctagggagggaaggaggatttcaggggcccaggctcacaggacccctctccccagggccctccagctcccacctggaccagggcccaggggtcaagagacaaatccatgctggccactgagcagagctcatccctgggccctgagtggagggcacccaactgatggacaagggcgctgggacccagaggttgggtcactcacccgaggccacgtagcagggaaggaaggggaagtggctgggggacaccgtgtgggcagggtctgcgttacctgcaggcagctccccgaggagggggttggctggctgggccccaggctggagggcgcccaggggtgagtctcccaggatgccgggcttctagggacagagcacagacagttgcagatgggggcagggtggcccagggaagcagacaggtgtggcccagagtcttggcagacacaccccaactccagggcacggccgatcctgggcagacaggcacagggttccccagtgcccgccacactccaactctatcactgtcccatcagccatggtgaccgagggtctcctgagctccaggccccagttccctggccaatgattgcagcacagtatcaactgcagccacatggaatgggacagccacacagtgtttcagccacttttagtcacagaaggccagacccacaggctcacatattctgtcagttaccaccagacagacacacctgacttagaatccagggaaccacaccagacaggacggagcatgggtgtatgtctatgtgtgtgtgtgtctgtgtgtgtgtgtgcgtgtatatctgtgtctttgtttctgtgtgcatgagtctgtcttgtgtctatatgtgtgtctgtgtctatgtgtgtgtctttgtcttatgtctttgtgtgtctatgtctctgtgtgtatatttgcatctttgtatgtgtgagtctatatgtatacctgtgtttctaggtgtgcgtgtgtgtgtgygcacacactgaggggatagacctggagttttttcccaggcatgtctatagagcttccgagcagagtctattcacaaactggtgcccagcagcggcgctcccagcccacacccagtttcaggctgtaaatgggcgtgtccaggtcccctgaccccaccccaggcaccaagtccaggggcgctctcagaatggagggaaagatggcgaaccatcatgagcaattgccagagggggatggggatgtgggtgggaaaggcaggggtttgggggagtcgccctcaccctggttctgcgcccccagggcacagccagaggtccccccaccccaccgatcgcaccagctgtgttgaaaagagcctgtaggggctgtagagcagtgggtgagggggatgcgtgtgttaccttctggccctgggtctgcagggcgagctgcaacagcgccgtggacagggctggcccattgagcagcggcatggctgggggggcacccaggaggcctggagggagacataggaggatgtgtgggggtccctgtgtcctccctgccccacctcacgaaacacagccctgaacccattgatggggcaggaaactgacactctggggccggggggtgggcagtggacttgcccaaaggaagggcctagaaggggcagaggctactccagtgaaggtcagccccctcttgtcagcaccccacctcactgcaggctgctgtgtggccctggtcccggcccccagttgtggacagcagcagcccccgctatgactccatactccccctcggccctactcctggggctcctgtcactgcagccaagatgagcagtttcgggaagtgccgggggcagcgctgcagcccctgttctgcacagtggggcccctgtccagccccaccttaccctgcttcccccccgcactgccatggagcagggggttgagcagcagctggagggacgcggatgggcccaggttgttgagcagctgcaggatgttgggctcggggaggagtcccttcccccgattgagggcctgcaggaaggaacagaagcagctcagagtgccgctggggccctgacatccccatggggctcccatccccaccccgccacctctgcccgcacaggctcaccgtggcctgggcagcgatgagagcggccagcatactgcggccggggggcccaggggcgcagaaggagactcgcaggtggctgccccccagggacaggccgtccgcctgctgctgtgcctcctccgccatctcagccgtctcatactccagcaccgcgaagcccttcagctgcccatcctggccgcacgccagctgccggaggaaggcaggcagtcatgagcatctgggcagcagtgactgcaccaccccgggaagtgacaaccgtaaccagactcagctgccccataagggtgaactccacgccaggcctccactgccctgtgcctcattcctgcatcagctcatctgattttcccaatgaccctgggaggctgcatcatacccatttctcagagaaggcaactgaggcacggagaggtcagcgcacccaaggccacacagctggagggagggcggagctgggagccacctcaccaacaaagccaaggccacgggcggatgcggtggctcacacctgtaatcccagcactttgggaggccgaggcgggcagataacctgaggtcgggagttcgagaccagcctgaccaacatggagaaaccccgtctctactaaaaatacaaaattagccaggcgtggtggcacatgcctgtattcccagctacttgggaggctgaggcagaggcaagagagtcacttgaacctgtgaggcagaggttgcggtgggccgagatcgcgccactgcactccagcctgggcaacaagagcaaaactccatctcaaaaaaaaaaaaaaaaaagagataatcagcaacgggtggggaaggaagggctctcgttccagacagtggccaagccaggtagcagtgctaagggaagtggttgggctgggcaccggcacttgctgaatgcccgggcagcaaaggtgcaggtagcagcccttcacctctgcccacgccctgtgccaaggtctgggcacagatctcccataaccaaacctgtcggcttttgttttgttttgttttttttgagacagagtcttgctctgtcaccccggagtgcagtgatgtgaacttagcttaccgtaacctccacctcctgggttcaagtgattctcctgcctcagcctcctggtagctgggattacaggtgtgcaccaccacgcccagctaatttttgtatttttagtagaaatgaggtttcaccatgtcggcaaggctggtcttgaactcctgacctcaagcgatccgcctgccttggcctcccaaagtgctggattacaggcgtgagccactgtgcccggccataaacacacccatcttagggatgaacagagagagactcagaggggtcacagagtgatcaaggccacacaattcctaagtcgagggactgatgtgtgaacctcaagctgcttcactgtcaagcccaccctccattcagcygggtcacctaacattaaaggtgggctcctcggaggacatcacttcaacgcctgctactcatcagatgctcaacaaatgtttggtgagaccaggcccagtggctcgaatctataatcccagctctttgggaggcaaaggcaggaggatcgtttgagcacaggagtttcagaccagcctgggcaacatagggagaccccatcttcacataattttttttttttttgagggagtctcgctctgttgcccaggctggagtgcggtggcatgatcttggctcactgcaacctccacctccctggttcaatcaattctcctgcctcagcttcccgagtagctgggattaaaggcacctaccaccacgcctggctaattttttttctatttttaatagagacagggtttttgttttttgttttgttttttttgagacggagtctcgctctgccacccagactggaatgcagtagtgggatcttggctcaccacaacctctgtctcccaggttcaggtgattcttctgcctcagcctcccaaatagctgggaccacaggcacatgccaccacacccagctaatttttttttttgtatttttaatggagatagggtttcaccatgttagccaggatggcctcgatctccagacctcgtgatgcacccacctcggcctcccaaagtgctgggattacaggcgtgagccaccgtgccatgagacagggttttaccatgttggccaggctggtttcgaactcctgacctcaagtgatctgcccgccgcagcctcccaaagtgctgggattacaggcatgagccactgtgcccggcctctacataaaattttaaaaatcagctgggcatggtgaygcattcctgtagttccccagctacatgggaggccaaggtaggaggatttcttgaacccaggaggtcgaggccggagtgtactcctccagcctgggtgattgagaacctgtctcaaaaaaaaaaaaaattaagtttagtgaatgttcgagtggaggaatgaatgggcagctgttcacaacaacctgatcatgaagcactgccagccccattttgagatgtggaaacaggctaggagagtacctgtagctggtcatgaccctgtgacctttgatctccacataagaaggtaaggccaggccagcgcagtggctcacacctgtaatctcagcacttggggaggccgaggcaggtgtatcacctgaagtcaggagttcaagaccagcctggccaacacggcgaaaccccatctctattaaaaacacaaaaattagctgggtgtggtgtcaggcgctgtcatcccagctactcgggaggctgaagctggagaatcacttgaacccaggaggcggaggatgcagtgagccaagatcgcgcccctgcactccagactgggtgacagagcaagactctgtcttaaaaaaatataaaataaaataaaagaaaggtgaggccattgtgctaactcatcttctgtcctgagcccgcacaggcggcctggtacatagcaggcctggtacgtagcaggtgtccaagagaaagcagcagaatggatgaatgataagtaaacagagagggggttcccgtggctcatggatactcagtttttgttttttttgtttctttgagacggagtctcgctctgtcgcccaggctggagtgcagcggcacgatctccactaaccgcaaccgcagtcttctgggttcaagcaattctcctgtctcagcctcctgagtagctgagattacaggcgcgtggcgccatgcctggctacctttttttttttgttgtatttttagtagagacgggatttctccatgtttgtcaggctggtctcaaactcctgacctcaggtgatccgtccgtctcggcctccaaagagctggcattacaagcgtgagccactgcgcctggcctgtttttttttttttttttttttctgtttttgagatgcagtgttgctttgtcacccaggctggagtacagtggcgtgatctcagctcactgcaacctccacctcccaggtacaagcgattctcctgcctcagcctcctgagtagctgggattacaggcctgcaccaccacacctggctaattttttttgtatttttagtagagacagggtttcaccatgttggccaggctggtcttgaactcttgacctcaagtgatccacctgcctcggcctctcaaagtgctgggattacatgcatgagccacctcacccagcctgtttcttgttttaaatatagagatggtgtcccactatcttgcccaggctagtcttgaactcctggtctcgagtgatcctcctgcctctgcctcccaacagacacctagtttaaatggggcaccaataccccacttacacgagagggacccactcaagcccacagagctgggggtccgagcccaggactgtctctctgtttttgagatragggtctagctctgttgctcaggctgtagtgtcatggtgctgtggtgcgatcatggctcactgcagcctcggactcccagaatcaggcaatcctcccacctcagcctcctgagtagctgggactacaggcacaccatcatacctatctaatttttgtatagagaggatttcaccatattgcccaggctggtctcgaactcctgggctcgagggatccgcccgcctcagcctcccaaagtgttagggttacaggtgtgagtcactgcacctggccaggcctaccccttttaagcctctgcactggcctccgctcactggcccaagctctggagctaggctgcggtgttctgatcccagctctgccagaccctggctgtttaactctaggcaagttacttgacccctctgtgccttggtatcctcacctgaaaatgggagtgatacctgcctctcagggttgctacaggatgaagcaactgaaggttacgtactcagagtccacagcgagtgctgggggaatgtcccctttgggatctctggggatcaagaccttctgggggctcttagagagtgagtctggcctgttctcgccccactgcacctgttacagggcgaggcacacacacagaagtgcctggcatgtgtggcttgaatgaacaagggactgttttgccaacccattgtgcaagtattgagtccctgcttatggaggagggaaactgcagatcagagagccagtgactggcccgagctcgagggcggggctgggatctggcaaagcctcagtctctgacctcaaggctcaaatagactgtgggctcctctgcagcctcctcaatgcctggtccaggtctgggaccccatgggaggtttgacgagggtaccagcgaatgaggaggtgagtggtgagcaagcctcgagatccatagttacaagagtggccttgcatgcatctgatagagggacagtgaggcctgaggctgcagagggattcaaatcccctggccaggtgtggtggctcacgcatgtaatcccagcactttgggaggatcacctgaggccaggagttcaagactatcctggccaacatggcaaaaccccatctctactaaaaatataaaaattatccaggcatgggggcggggcgcctataatcccagctactctggaggttaaggcaagagaattgcttgaaccaaagaggcggaggttgcagtgaactgagattgtatcactgcactccagcatgggtgacaaagtgagactgtctcaaaaaaaaaaaagaaaaggcagatgactccaaagactctctcaggtgctccgggcctggcacctgctccccaatgctctccacagggctcacctggcagaaggtggggctgtggacagctgacagcgcccggcacagagcgtccacatcgttgaagccaggtggcaggcggtccacacagaggcagcgggagtggagaagggcaggcgtcagttgcccggcatccgtccagtgcacgtagagggtgcgtggtcccagcggcttgcccagcaggtcygacttggcacgggcagccgagtccttcttcatgtactcrgcaaagccatagcccttggattggccagtgcgctcactgtagaccaggaagcagcgctccaggctgccgaagggccgcaccagctcctcgaactgctgctgtgtgaggctggggggcaggttggccacacacagcagggcatccgtgggctgcagctgcaccgacagttcrcgctcccgcaggcggctctggtggaaagcattgattgcggcctcggcctgctccccattcagcagggtcacgaaggctgcggtgggaggagggcagtgcgaggtcagccgggccctgagggcctgcccctccaccccgccaccctgcaaaccaggtgggacctccaaatgctgggcatctcaggtgcctgctgatctgagcagttgccagccttggcgactcacacaggcgagagcgcctgccattgactctaggctccacgaagcccactccctctcccagccctgcgtccacctgcacccacagcagcgctcaccaactgtgggcctggctctgtcctaagaacgctgtgggtcactcgggtgataccaagggcagtggttaagcccatgctcactggggcccagatttaagccccaagccccaggtggctttgggggtatcagtttcctcatctctcaaatggatataacttaatcatcacaatcaccattttgccagagaggaaacgggcccagagcagcacccctgtgccccgagtaggggagcctggacttgaacccaggcagccggactccagaggcccactctacacactgcccacccctgccacctttccaggccaccagtgcccctgaaccctgctgccacgtgctgccccagatttgcgatccacccagcggccgcaggaagctttgttcaaaacgatcacgccacatccatcttgtggcttctagctgcagggtgcagtgcagcctgtgcgggctcgctgacctcccctcccatctcaccgctgccacccggaccacgccaggcacactccagaggggcctttgcagctgctgtttcttgagcatggaacactgagccccacctcctcacctggttaacctggacccacccaggtagaaaccctgtctctactaaaaatacaaaaattagccgggcatggtggcacatgcctgtaatcccagctactcgggaggctgaagcaggggaatgggctgaacccaggaggcggaggttgcagcgagccgagctcgcgccactgcactccagcctggcgacagagcaagactccatctcaaaaaaaaaaaaaaaaagaccacacaagcaggggtgactggctgagtgaggcaagaggggtaagaagagaatgaacccacggccaaacgttgtcaagaattagctcaatgccaagcgagtggagtaggaagagaatcagcccgatgcccagtgttctccaaggagaacatgaaggctgtcccaagatgacaggatgacaggcagattggggcaacctgccatgttggcctggggggcaatactgggcctgaagctcagagcagcagacagtgagccaggccctcccatcttcagggatggtcactccctgccctggcccrccccatggccccacaaacctgtccctttgtatttgtccacaaaacagtatttgagctcatagtcactgagcaggtcatgtacttcctgtggagatacaagacaaaagacagggagttactggagatggaagggggcaacccagtgccgcttcatagctgccaccagctatgaaggcaggtcaattaccaccccccattttaccaatgaggaaactgaggctcgatgcagtaattttgtcaaggtcattctgctcatacctggcagagatgggattcagaacctagctgcagactgtgctattacccaggcaacatgctcttagagggtatacctttagctggctgggcggggtggcycacgcttataatcccagcattttgggaggccgaggcgggtgaatcacctgaggtcaggagttcgagaccagcctggccaacatggtgaaaccttgtctctactaaaaatacaaaaattagccaggagtggtggcgcacacctgtaatcctagctactcgggaggctgaggtaggagaactgcttgcacccaggaggcagaggttgcagtgtgccactgcactccagcctgggtgacaaagggagacactgtcaacaacaataacaacaaggccgggcgcggtggctcacgcctgtaatcccagcactttgggaggccgaggcgggtggatcacgaggtcaggagatcgagaccatcctggctaacaaggtgaaaccccgtctctactaaaaatacaaaaaaattagccgggcgcggtggcaggcgcctgtattcccagctactcgggaggctgaggcaggagaatggcgtgaacccgggaagcagagcttgcagtgagccgagattgcgccactgcagtccgcagtccagcctgggcgacagagcgagactccgtctcaaaaaaaaaaaaaaaaaaaaaaaaaaataacaacaacaaaaaaaaaaaaaaaaaaagaggccgggctcacgcctgtaattccagcactttggaggctgaggcaggcgggtcacaagatcaagagatcgagaccatcctggccaggaaggtgaaaccccatctctactaaaaatacaaaaatcagctggctgtggtggcgtgcacctgtagtcctagctactcgggagactgaggcaagacaattgcttgaacccgaggggtgaaggttgcagtgagcagacatcaagccactgcactctagcctggcgacagagtgagactccgtctcaaaaaaaaaaaaaaaaaaaaaaagagtatgcctttagggaagccatttaacctgcatgaacctccttttgcaagattcactgtttccaacaactctgtaagtgaagtattaacaaactcatgttgtatatgagaaaacttaggctaggagaagtgaagagatctgctggaggccatgcagttgggcagcgcagccacccatgggtacctgactggggagcccaccttctagtaagccccacgttgtgtgggttcacatgcctcccaatttcctcctgctgataaagctgccctcttccaagccagctcatttatttttcttttttttagagatagtgtcttgttctgtcacctaggctagagtgtagtagcacaatcatagctcactgcagcctcaacctcctaggctcaagtgatcctcccacctcagcctcctgcgtagctgggactacaggcacgcaccaccatgcctggctaatttttaaaaattttttgtagagatgagggtttcactataccgcccaggctagtctcgaacccttgggctcaatacagcctcttgcctcagcctctcaaagtgctgggattaaagggatgagccaccatgcccagcctctcaagccagctttgaaggcaaagtgctggcgcctgctgggaccagacacactgtgcatcttgcaggagagacaatgtgttcccagctgagagactgcagacactgagaggaagacccagaaagaaacctgaccatccttaatgatccctgtcccgatctgtccccaaattcagcccctcccaacatccctggggttccactagccacgtgcccacccggtgtgctggtgggccggagagcagggaatctcagcagcaggaagcgagaacctatttcaccgccatagggcagggcagtatagatgccatttccctgggtccaaagagcattgggaagcgctgccccatgctggccccatgagaagggcactcctagcaggaagattagccacgaggggctccatagaacacaggcctcgcttccttcctgtaggtctgtaggctggtggcagaagaccccattttcccaaattaatcctgaggttttgggggctgagacccaggggctgctgttaacttccggatttatctctgagagcagtgaataaacgcgtgatatggaggggcgtactctccgcagtcctgaaacttctggatgtgaggycccgccaccctgtggtagagtgggtggagaaaagcatcatccaagcagggggcaactggtggtccaatgtaccagcccattcacaattccccaacaggaccaaagctgtccgcccccttccattccccgcccgcttccatcacttggtgtcgcccaagcctgtggtcgcccctagcaacgccctccctcacttcgcagtcggtttcccctttcatcatcgcccccccacgtcccgctcttggtctctcccgatcccgcgtggatccggtgcttgggcgcccccgccaacgacccccgcgcacctcagcgttggtgtcgcccggttccccccgcgcacgcgcaccgtggtatttcccgccacgctcctacaccgccccccccaatacctggttggtcacgtcccccgggaggccccggatcagtatcttgcggcggttacggaactggcgctcggtgtgttccaggcgtttccggatctcttctggatctagaggcggcagctcttcttccggcgcccggcgctccgcggcatcgccggcttcgacttcggccccagacttagggctcagcgggggccggtgagtaacggacacgtccgccgccatcttgggaaacccggcgccttctgggaccagcgagccggggcggagcggcatagagcggcaacgagggcgcgcccgtcgattggctgggagaaaccccacctccttcccgccccccttgccccgttggctaagccccagcccacctctcaagagttcaagctgcgtctgcgcgccacaggccccgcccccttccgtcgcagcgacgctactcagtggatgtgcacctgggtgggagagacttgcagcgcgggtggaatcaaaccacagattagggagtttgaaggctttattggtgcggaatctgagggcacagccaagcccccgccaactttgatcccggatcccagcgtcactcagctctggacggttcttcccccattgcttctgtcggctgcatagacgtgaggggcagataggtgstctcctccctaacatggtaactgccgctccgttggtgctccctgaagacgtacattaaggccagtacgatagtcaccacgcccagggtcagtaacaccgccacgaagacggggacaaagtgggagctcccagctgtgcagagaaagcgctaagtcaatatgcgtcccttctgtctccaacccccccgccccccggcttaccggtccagacccgcagccccgtrttagctcaccctcaatgtccatcaccacgaccagggtgtatttgcctcgtgagctggacgcttggcactgataagtaccattatgtgttacgttgacgaagaacgggatccccaccggcacctcccggctggagccttccttcaaacaccgcagctcggggtacgggttgcccctggcttggcactgcaggacgtgtctcgttttatctttccatttcaagtgctgggggcatgtggctcggtcaattttgggaccatctgtggaaccaccatgtgtgatcagacacccaacacacccgaggcacagtggtgcagaggagcgtctaatctttccagggcaggggtggagggattaaaggtcagggtgaccgactcacacaggactcgcagctggacgctactgttcctgtgcaagaactcgccgtccacctcgagagtggcactgcagaagaagctgcgtccgtcgtcactctcggtagcatttagctgaagttgagctggctgccccggggccgcggccggaactccgtccagcgtgacctggactcgagccccagccatgcaactcacggtcactgtggacccctcatgggcggtgggctcgctgaggttcacaatgggtcctaggaagcctaaaggcggggcattgcccaggagcttaatgaacaggaccttcctgtgggtcaagccgctccctccgccctcccctttcctctcgggatatccgggccacgctttcggccgttcaagcctcgccctctttccgcgctgtgtccagcttcgggcactcaggcccaacccacgttgcaactgctattggggcaagccaggccccaccttttcggctagtctccgccccctctgccacgcccccagactgctgaggccgcgcccccttcccacgcctcctcttactaaagaccgtcaagttctcccgggcctcccgtctctcgccccctagggtcacgttgcagacgatytcccgggcaccctcctgatccgcgcgcgccgtggctgtggctgtggccgttagcgtgtccccgtggttcatgactgtcgcattcagcatctggtcccccagcgccaggtagacctgggcctctgaggctggaaaaagcccgtctagggtgcagtccaccggccacgacgtttccacctccaagaaccggggggccacgaggcgcgggggggtcacgggcaggactggggagaaaggtgggcatagtacaacccccaggactgtgccttccccaggacaccctcatcccccccagtcaggatatcttgctgactgggtcacccttcttcrcaggacacacacacagggccatgaaaacggccttcttcaaagatcccacggctcgggcctcccttccggggccaccttgcccagtggccgggggctttccttcccagaagcctgtgaggtccggggtaccccactctcaggaaccccaaggtcagggcaccgtctaccctggctcagctcgtcacccaccgtctgaagccccttctctcaccaaaggttcggagctggcggggggctgaggtgttcacgaacagtcccagcccctggggctgcatgtccagttctgtgcggcatgagaaaggggctccgtggtcgtctctgctggccagcacagtggcagtgacctccgctggctcctccactgcgggctgccggctcagctcctcctcccagcgaagcagcaccaccgtgaggctggtccggggcgacccaycctccacttggcagcgcagggtgaagttctggcccaccggctgccaaggaggcaggggtgccagctccacacgctccgggagccctgagagaggaggggaggatggcacttagcgggtcctgcaaacccacccactcaccccagggactggggaggagacagggtrgtcctgccgagaactgtgagctttgagttaataaacttagagggcttagagctgggccagtcgaagcgtttgctattatcattagcgcagtgattatcatttcctgtgttgtcagataccttgcaaggcgctaaacaaaactttctgttctcaaagatggcamaataaaaaaaaatgaggatggaagggatgaacgtttatgactatgatatgaatattaaaaattcctgtttatggccagacgtggtggctcacgcctgtaatcccagagctttgggaggccggggtgggtggatcaaraggtcaggattattcagttctctccaatcaggttcagacactcagggctttcctggttcaccagccctgtggcagcctctcaagatactccggcacagtcacaggagacttgacactcccaggctgggtgccctccccagtacacctacaaaacgctgggcctcaggccgggcactgtggctcatgcctgtaatcccagcactttgggaggccaaggtggacggatcacctgagaccaggagttcaagaccagccttgccaacatggtgaaaccccatctctactaaaaatacaaaaattagccaggcatggtagcacgtgcctgtaatcccagctactcaggaggctgaggcacaagaatcgcttgaacccaggaggcaaaatttgcagtgagctgagatagtgccactgcactccagcctggcgacagagagagactctatgtcaaaaaaaaaaaaaaaaaaaaaaaggctgggcaaggtgactcatgcctgtaatcccaccactttgggaggccgagggaggcggatcacttgaggtcaggagtttgagaccaacctggcccatatggcaaaaccctgtctctactaaaaatacaaaaattagccgggcatggtgtcacacgcctgtaatcccagctactaaggaggctaagacaggagaatcacttgaacccaggaggcggaggttgcaatgagctgacatcgcgccattgtactccagcatgggggacaatagcaagactgcgtctcaaagaaaagaaaagtcaaaaagtaggccaggcatggtggctcacgcttataatcccagcactttgggaggccaaggcgggcagatcatttgaggccaggagtttgagaccagcctgggcaacatggtgaaatcctgtccctactaaaaatacaaaaattagctgggcgtgttggcatgcgcctgtaatcccagctactcaggaggctgaggcaggagaatcgcttgaacccggaaggcagaggttgcagtgagccaagattgcgccactgcactctagcctgggggacagagtgagactctgtctcaaaaaaaaaaaaaaagaaaagaaaagaaaaaaaaaagtagccaggcctgcaatcccagctactggagagactgaagtgggaggattgcctgagcccaggagtttgagaccaacctaggcaacatagggagatcctgtctctaaaataaaggtataaaaaagtgtaaatgtaaaacctccatttgcctactgctgactgaaaggggtacccccttttttgcttaagagacaagggtcttgcttttttgcacaggctggagtgcagtggtgcaattatagctcactacagccttgaactcctgggctcaagcgattctcccaccttggtcccccaagtagctgggacttcaggcatgtgccaccatgcccagctaatattttttatttatttttgtagagacggggtgtccctatattgctctgcctggtcttaaatttccggactcaagcaatcctcctgccttggcctcccaaagtgttgggattattgttggggccaggcgcagtggctcacacttgtaatcccagcactttgagaggctgatgtgggcggaacaccccgtctctactaaaaatacaaaacttagctgggcattagctggacctgggaggcagaggtcgcagtgagccgagattgcaccactgcactccagcctgggctacagagtaagagacgccatctcaaaaaaaaaaaaaagcttgttggggccgggcgcagtggcccatgcctgtaatcccagcactttgggaggctgaggtgggcggatcgcctgaggtcaggagttcaagaccagactggccaacatggtgaaatgccatctcaactaaaaatacaaaatttgctgggtgtggtggcgtgcatgtgtaatctcagccactcgggaggctgaggcaggagaatcacttgaacccaggaggcgaaggttgcagtgagccgacatcgtgccactgcactccagcctaggcaaaaagagcgaaactctgtctcaaaaaaaaaaaaaaaatgcttgttggggcccaagttaattgatttcacaactgctgccttggcatgagattgagatgcgtctctatatctctgtctctgtctctgtgtctctgtctctgtctrtctttgtatctcacacacaaatgtccaggtctgagctctgggtcagaactgtggtccattctttgcaaactgagggtccccactctcctgagccattggccacttgcccacaccactacccaagaccagtcccacctccggacacgtygactcactgtacacggtgatgttagaggagcctgttatctgrgagccattgcagtacactgagcagaggatccgactgttgccagtcacgttgctgagattgaaggctgcccagcccatgccactggccaccagctcctttgatagggacgtctccaaggcgattttctcagagctgggacaatcagtactgcagttcacaaacagggaccctccagcagagagcacagggttctggggctccacccgcaaaaggaactcctgcccctggacaccttcaggaacatgaagaagtcctggtgtttgtttccttgtyccccaacccacgcatcaacaggccccaccatttaacacctctctccttgtgccgagacagaagggttcctgccttcatggtccagkgggaaaggtagaatccatcagagaccrgggagaactcagaaggaggccagaagaggctctgatccagcataggaggaggtgagtcagggaaggcttcctggaagcggggaccattgcagcccgaaactgaaggctaagtaggagttagcaagtgaaagggacaggtgatcctggcagagggaagcacatacgcaaagggcaaatttcaggagttcagatggagcaggaagcatgaggggtgtgtgtgtgtgtgttaggggagagggatggcgtacaagcctatgctggggcctgaccacctgaaggctgaactaaggaaccagaactttctcccgaggatacagagtcagcggccaggtcgcagtgtggcaggatgtgaacagcgttgcgttctattcctctaccctctactgatccccaaaacgcagccctctccagccctccccggcttgactggtctcacctggggtcagcagacagcagaccagcagagtccagcaggccctgggccacaacacggatggtaccatggtrgccattctgacagaggaaggtgccttcctgaggtgcccgaagggcaggcaggggaaaaggcggggcctcccactgcgacggaagcacagcggttaagattgcagaagtctggggactgcaccttgcccaggcctgtgggtggaaggggatgctgtggcccttgggggccagggtgggggacccagacggggctctgcaaagtggccagcactgctgagtctcccccagggaatgggctggtcccagttgcactgctggcccccatttgaattcacaggaaatgctaactaaactggtttcttttgttctcagcactgggaagcctgggtgggggggatgaggcatctccttctggctgaacttaggtgggtaggggaatattctgtccccagagaggaagttaatggggaaaactgtaggcaccattgtgtagatgttaaggtgggatttcgaggaaacattaaaaaacaaaaacaaaaacagaaacagaagcagagtcttgctatgttgccccgactggtcttgaactcctggccttaagatggcctcctctcatcttgacctcccaaagtgttgcgattacaggcgtgagccaccacgcctggccacctttgaagatcttgaggatacctccctatctttgaagatcttggggatcccccatcccctgcacaaagagctaaggtaggtgatttggggacagctgaktccctgagccactgtctatccaggattctacttggtttttgtttgtttgttttgagacagagtctcactctgtcacccaggttggagtgcagtggcgggatctcggctcactgcagcctctgcctcccgggttcaaacgattttcctgcctcagcctcccgagtagctgggattacaggcatgtgccaccacgcccggctaattttt

SEQ ID NO: 2 - DNA, 110950 bp, Homo sapiens
attttcccaaaatactagacagtcatatataatggaaactgcaaacctccgaaagtgtgtctgcgtgtgggcaaatagtaaaatagcattgaatacacaatgtcttcaaacacagtacacaagtttgacagttattctaactgctctaaaattctttttatcagattcactgctaacatgcatggaaaatatgatgacaaattcgragattcctaaaagagaaaagaaggctatataatacaatcaattattacattgtcttttttcacaattctgtaataattgatggtaattcaatagatatttatctttatctaactttatctttaaaactatcccaagtttacttattactgctacggttttaaattgcagcagctgaaatatagtaggacaaatgcataatttggaataagactaaatattgcatttcaccttgatcacatcgtctctgtgccctgagcaaatagtttaacttctctaaccctcaattttctcatctgaaaaaaaaaatgaatcctctctttcggactttcaagaaatttaatttggaagatataagggaaacatttgcatctactacagtgtttctcaaagtgtaatgcacccaggaatcacctggggattctgattcagaagctctgcattgggtgctaaaattttcagcttccaggtgatgccagtgctactattctattattgctgatgttatctggaagctggtttataatgcaaaatctcatgtcccacccaatgcctactgaatttcaatcttccttttaacaggatctccaggtaatttttatgaactttaaaatttgaataacattgatgtagcagtagatcttgcttattgctgatatgcagtcgaaaatattataagttttgaatcatcacaagaaaagtgtgtagaatataaatgaatataatatgttttttcctcttcaaaatctgattttgaattatatttcccaggtgtcaccggaagctaaagagtggccttgcctcaggtcaggtttctactccctgacagcctctcaattagctgctgttgtaatgaaattatgcattgtcaaaagcctttttgcatcattttcttcaccaaatctcaagttttaagtattttatatagaaactacataaaatccaaccctgctctgcccattccagtggctgccagatagctggttttctttgtgattttgggctgttggttttctaggagaggaggagaagattagagcaagttaaaacgccacagaccttgctgctcttactgagattcagccatttttcttaagtaaacactctccagattgcatcaagccattagttaatttacagaattccaaaatagttgattctggagatttttgctagttgcttatatggtgaagaggatttttggaggtcttcactacaccattctggctgatgtcgcttaaaatgccctgaagtttttgaatggtgaacaaaagtcttatggattttcattatcttgatayattagagaaaccatgcatccacctgattgtattgggctccatttacagatgccactaaaatatcttgatagtttgaggcaattattagatgagaggtcacagtgacctcctcctaagaaatatttctcagaattaaatgtcaaatttttaataaacattgtattatgattaagagcccaggtttttaatgaaccctgggatcaagccctgggtctggtccttaacgtgtaaccttaatcaagttacttaacctttataatacagtgataataacagtatgtatgtatagatttatttcaaaattcaattaaattacaaaagcaaagtgcttgacacagttcatggcacaaagtaaatgctcaagatgttttagcttctattgctattatcatagttaagaatatggtttggtactgataataataatgaatgttctcttgaatgtgtttctttaagagtcacattgaaatagaaataaataaaaactgtctcactcatgctactttatgttctatgcaattctaggcactgtggtggtccagcagttgatgtcagtgatgattagcaaacatgattgcctctttcccaaagatgcagaactacaaagcaagccccaagatggagtgagcaacaacaatgaaattcagaagaaagccaccatggggcagttacagaacaaggagaacaataacaccaaggacagccctagtaggcagtgctcctgggacaagtctgagtcaccccagagaagcagcatgaacaatggatcccccacagctctatcaggcagcaaaaccaacagcccaaagaacagtgttcacaagctagatgtgtctagaagcccccctctcatggtcaaaaagaacccagcctttaataagggtagtgggatagttaccaatgggtccttcagcagcagtaatgcagaaggtcttgagaaaacccaaaccacccccaatgggagcctacaggccagaaggagctcttcactgaaggtatctggtaccaaaatgggcacgcacagtgtacagaatggaacggtgcgcatgggcattttgaacagcgacacactcgggaaccccacaaatgttcgaaacatgagctggctgccaaatggctatgtgaccctgagggataacaagcagaaagaacaagctggagagttaggccagcacaacagactgtccacctatgataatgtccatcaacagttctccatgatgaaccttgatgacaagcagagcattgacagtgctacctggtccacttcctcctgtgaaatctccctccctgagaactccaactcctgtcgctcttctaccaccacctgcccagagcaagacttttttggggggaactttgaggaccctgttttggatgggcccccgcaggacgacctttcccaccccagggactatgaaagcaaaagtgaccacaggagtgtgggaggtcgaagtagtcgtgccaccagtagcagtgacaacagtgagacatttgtgggcaacagcagcagcaaccacagtgcactgcacagtttagtttccagcctgaaacaggaaatgaccaaacagaagatagagtatgagtccaggataaagaggtaaggaaaatctggaggtcgtaactaccagagagggctcagtagcctcctactgtgggacaggatcacactgagggtgacatatgctggctccaaagtcaaagaaacacaagtttgctccatcatttatgagctttgtgactgtgtgcaagttagcttcatctctgtgagctttgattccctaatgtaaacaatttaaatactagtagtatctacctcaaaagcacataagaagtgattgaacatttccctggtacagaataggctcaataatgtcatctttgattattattaaatagatagatttgcattagagggctggaaggagaggggctgtgaggagatggacagagcattaggagcctgttagttttcactaacaagaaaaggatgaaactagggtaaaaaaagtagaagtaaatagacctccatgttttattctttcaatcattgaatgttgagagagtgccttctatctgccaggctctgttccagacgctgaggattcagatgagctgagagaggccataagagccaggtgacataggggattgacaggctgattttcagcctttgacttttactctgagatagaaatccatggaggtttttgagaagaggggtgacgtgaagtatgttcacatgaataaggaagactgtagcctaaatgaggaaaaaagaatatgatttrtaaagaagcaattatgctaaaacctaattatatcaatgtgcatcttctcataaaatgatcaaagtaggagtagctcctctagtgttctcagtcccagtttcaggctgtgtgatttggacaacccttcctccatggtgtgctaggatcctcagtyggttgttaagttggctttaatttaccttaatatgtttcctatccattcatcaattatcagacaaaaagataacgtactttcagaagctatggcaaaataaatattaaaaaatactacttataaatgagattgaaaaattacttccttggaaagtatttttttggtaagtttcactgagtggaattgtggtttgaatttttctatataatggagagtgacaggagatttaaagaaaaatatagggtcattatcttaaaaggttactcttctttctgaatgtagtttttggaaccactatgtattggaattctgaattactgccaatccatgatgataaattagcatttcacactgggaagcttatattttgaggcaaggggtcacactttaaatgtagtagaaaaagaaaaaagttatcactatgaatttgcagatggatacattcatttctgaggatgttgctgatgcatatatgttctgagatctacggtatatttcagagattttgataaactgatagaacttcccaatagaggtcatcttaatgggccatttcagtgtcacattcttaccctcrtgacaggccaagggagagctctgcagtagggtggagggtgggggaccgctcgtggcctagccatgaaattatagaaagttaactgttctggctaaattttgatcatttctgtttagagttattcatttttctttaaattcctttataactttaccccacaagcattgaaggtagatggatggatagataggtaggtaggtaaataggtaggtaggtaggtaggtagatgatagatagatagatagatgatagatagatagatagagagatagataatagatagatgatagatatagatagatagatagatagatagatagatagatagatagataatattttactttgtttaattatcaataagatatatgtttaaatcatttataactttaccccacaagtattgagggtggatggatggataggtaggtaggtaaataggtagggaggtaggtagacagatagataatattttactttaattatcagtcagtgagatatatggtttttagttttgaaacatatattctttttccctctccaaattggtttctaactttttcttttcttatttttttttatgttttattttttgacagagtctcactctgttgcccacgctggagagtgcagtgatgcaatcttggctcactgcaacctctgcctcccaagttgaagcgattctcctgcctcagcctcctgagtagcttggattacagatgcatgccatcatgactggataatttttttttttcttgtggagacaggggttttaccatgttggccaggcagctcttgagctcttgacctcaaatgatccacccacctcggcctcccaaagtgctggggttacaggcataagccatggcactcagctagtttctaacaattttcttaggaaatattgtattgtggtcagagaagttcatctggatgatattaattatttggtctattaaaactattcccttattactggattgggattctatatatgaccaagagatcaagtctgttaatcaggctattcaaagcttctgtatttcttctcatttttatcagctatatcaataatttttgagaaagatactttaaaatttcctatcagtattctgagtttatcagtttctttttataattttgtcatattttatattgaacaatttgaggctctactactaggtgaatagaagtttggagttgttcatatctccctgaagaattgatccttttatcattaattagtgcctatttttcattgtaataatgctttttacctgaaactctattttttctgatattaatattgtcctaccatcttcctttgattagtaacttcctgatatgtcttttcctttatttaactttcaaactttgtttgatgatttgatctaacaacttacatctttacaattctggaatatttttttcatcatctttttgtctatttcatcttcccaccttctcaattttctctttccagaacccttattaagctatgtttgaccttgttaatctatcctctgtctttgttaacttcttttttccatattaaatttctataattatcatttttgaggcattctaggtaacttttctcagacctgttttgtagcttactaatactctgatgagctaattcaattctgatacttccccaggcccatgattggagattttgtagtctcttcttcataaaaacagttaatgttccaagctctcagttaaattacttgtagttttctgcctgcctaatactggaggcctcaccttctgtccccatgtgaaaaagaaaaacctagacccaagctctgtggcctctatccaagactaatatccttcgtgtgcttctacttattgttctatatttcggtttcttccttggttctgatggctgaagctgctgttttattttaaccttgatgatgtattttaaaaatatatttcttaaaacttttccagcacttttatatgtttgcattgggagggatttcttctgtattcaacttagtccttttcattcctggaagtttcccacaagcacctgatacatacaaatgtgtcaatatattgttttgtaagggttgtccttctcagtattttaatttcaatttcttccaaaattttggctctaaaatagctttggaaaacaaagagaatatattgtagaataattctgagtggaaaccagcatagtaccaacttttcatgtaaaaatgtggtcatatgtttaaaatagccttctaaatgatgtaggattacaaaatatgaagtattattttttaaaattctagttgcttacaaagagaaggaagattaatttttaagtgttcttattatctggatgaaatatcaacatgtggggatcaaatttttcaaagcagaaacataattgagattttaatttaaaaactgttattaaaataatcagatatctgagagctacacatgcattaacctttcaaatttcagtggtatggtaagtttgaatgagtcccatgggacttttgctcagaataggagaaattaaaaagtcagccgaggccaagatacatcttaaataaagatgtaactttaatacccctcttttgaataatatatgtatatgatttggatcttagtggttatggagaaaacagtctctgtttttaaaaacgttactgcgaattctacaattatccaaaagctatacaaaacaactatcaatttatagagatataaaatacctatgcccagagctatattaataacttgggaagcagtgagaattggggatggaaaggaatgggctttatttttacaaaatatgagatgcagtgcttatttaacacatgtgatctttacctctcgtatcaatgtaagctcattactttgggtactcttttataagatgggactctatatgctgccaaaaaccccattcttagcagtgaacttaaccaacaatgacattttcctatcactatttttccttttatagaaggcaaatgttattgccctcttttttttttttttttgttaactatcagactttcctgctgcatttagtgtagtgaacttyacaatttaatgtccaggaagctttctgcctcgtctgcccggcatgtgttactggcttatctgtgctggcattcacttatttactattaaatgacagctgcttccaagagaggccttgggacctaatgactaaggtgacagtaaatcatcttagcaaacagtaaaataatacaacaaaattacatcctttaaatcattgaaagggctttattccaatttcctaagcatcataaagagtttagaaaatatttgtatgtctcttgcatttcaagtgaataaaatcactttatctcttactcttgcgtccccaccccccaccccccccaacatcctttgtagcttagaacagcgaaacttgactttggaaacagaaatgatgagcctccatgatgaactggatcaggagaggaaaaagttcacaatgatagaaataaaaatgcgaaatgccgagcgagcaaaagaagatgccgagaaaagaaatgacatgctacagaaagaaatggagcagtttttttccacgtttggagaactgacagtggaacccaggagaaccgagagaggaaacacaatatggattcagtgagcctgctttcgcctgctgtctctgatggctctggcaaggactccagggattctggtgggatatgacttagaaccaggtggctggtcacctggatgtacagaagtctaactggtgaaggaatatcatttacagacattaaacatccatatctgcaatgtgtaccaaagttatatcatgccccataatgctactgtcaagtgttacaactggatatgtgtatatagagtagtttttcaaaagtaaactaaaaatgagaagcatatttcaagaattattttattgcaagtcttgtatttaaatgttaaatcaatwtgttgttgcaatttagcttgctttcaagcttcaccccttgcacttaacataagctatttttggcattgtgttatcatcggcttattttatagatcaatatttttatttcccttttttgctgaggaaatgaagataagcaaaaatataaatatatatataaatatatgagttattaaaatcagaagaatactttgtggctgtgctgtttgtgccaatagactttgtcatgaccaaaaagagaaatgtaaatagttttataaaatacagtcgaatcaccaggaacctttgagctgcttttaaaattcttcccctggcaccactcagttttgcttttgcgaggcgatttgacataggaactttgagactccatgagaaagtccctttctgaggcccactgtctaccttgccagatcctcagtgcgtatcgccaatgcaggatgctccttagaaaagaaaaaatggtaaagaatggcatttaacgattcaggctttgaattactctgtccctctggaccgaatctctttaactgctgsayagttttagaggaattctcctgctacttaggtactgggaaacaatgcttgctaaaccatgcccacgtgagcacctgtctcccactcaaacctctcccatctcccaacaactgcactttagaataccagcagtgaaatggtattactgtttccctctgagtgaaactgctagagtatatgtcacgtagtgacatttttttctcactcaggctattgccatctgggattctctccctactacagctggcaaagttggtttgcagcaagaagatagtgggagggggccaggctgcaggagaaggagaaaagtttagaagaaacaaaccattttgcttctaattttgacagtatcactttcctgttaaaacatacaataattttaaaaggtgaatgcctaaagttccaattttagcaaatatgggaacctcagcaatgctaattttctagaaaaacccagggctctttggagctagagttttgggagaacagttcttcacaataaggcaatggttttgagaggccaggcaaataatctttctcaccgtagaacaaaaagttacaaaaggcataatcggaaatagagactacatacttgagtttatggggtttgtgttgtttgaaggttcaatgcttgcatgtgtttatttattttcaagagggaaagtggtctgtactgctttcatccttgccactgtcttgcttttattttttactctcccactgagcaagcrtctgtggtcctatggtatcaaccagtatctttatagcaataatttctttaattcccttttctctctctttccaattatttaaccagttacttccacctggacatacgataggaaattcaaactcaaaatatgaaaattgatcttaataactctcccttcatatcttttcacctatttccagtccttatcatagttgataaaaacctcagactcatccagaaagctatatgatgcactagtaaaaaaaacaaagatattcaaactgcttgggttcaaatggtatacaatttgccagctgttactgaaccttctatgcataactttttttttcctctgtgcaattggaataataaaaatactactcccatagagttgttatgtggtcttaatgagatagcttgggttaggctgagcacagctgctagtagaatccaaaaaggggccaggcatggtcgctcacgcctgtaatcccagcactttgggaggccgaggcgggcggatcacgaggtcaggagactcagaccatcctggctaacacagtgaaaccctgtctctactaaaaaaaaatatatatatatatatatacaaaaaattagccgggtgtggtggtgggcgcctgtagtcccagctactcgggaggctgaggcaggagaatggcgtgaacccgggaggcagagtttgcagtgagccaagatcaagccactgcactccagcagcctgggcgacagagcgagactccgtctaaaaaaaaaaaaaaaaaaaaaaaaagactccataaatgttaacgcatattttctttctttctttctttctttttttttgtggggggacagtctcactgtctccttctgtcacccagtctggagtgcagtggcatgatcacggttcactgcagccttgacctccctaggttcaggtgatcctcccacctcagcctcccgagtagctgggactgcaggcatacgccaccatgcccagctaatttttgtattttcttttgtagagacagggtttcgccatattgcccaggctggtctcaaacacctgggctgaagctgtctgccctcctcagcctcccaaaagttatgcaagatgcatagcaatgacgggtcacttaatttgtctgggactacaagcgtgagccaccgcgcccagccaactcatatttttcttctctacccacttcttcactcataaatttgctcaccagctaatctattccactcatctttgcctttttaatctgctctctttaatcacttttcccttaccttttgatgaaggcatcctacccagcgcgttttgttccagcatctctcctgtacttttgtcctttgcaggctgccttttcgaaattattcatctgaccatagcttgatcttgctcattacatatgatgactgtcacttgcccaggacaaagcccttcacatagtgtaaaaggtcctactgccagtttcattcttgtctcctaccacttcccaccacacctgccatgccatttcatacctctagaactttccacttgctattgttgtgtccttcttgcttgccttctttctagctggcatgctccaaacatcctttaagagccaaatcaatgtcagtttcctcatgaagcttcccagaatctcaaatcagtgttagttgctttttgtgcccccattcgcattatctctttctgtctttcccacatctgattattttctttatcaaataagaagcaatttaggagggagagtgatgaagtggaaatagcagaaaattgagagccattcaaacctagatctgcctctcaacatgccttatgcaagatacatggcaatgccaggtaacttgacttgtctgatctcatctacaaggtggagataataactcctacaaagtagggatgttgccgtggttaatggtggtatgtaatgtgcttatcccggtgcctgtcactttgctccactgataactctattgataaatggagcttcttaaggggccaagattgtatcttcttgctgttaaatccctccatgccttatgccaaagagaatgtcagcacagtgagtttgcagtaatttttgggaatgcaaatatactcaaacacacacacacacacagggtgttttgtggcctgtgatatttgagggatgatattatcaattttaattgtcaatttcagtgatgatggcactaatcaatggataccatgagcagcatgttcatctgggtttccgttagtcaaataaaaagcctagacaatattaagtacaattaacataagaataaattggaaatcaataaggatacaaagtagttaggtagtatcaagatttcatttgctacatcctgtatatgcctctttaaaactatttaggtaattaaaatgaatcttaagttataaactcgagaaaggatttgctttcagatgtggggcctactgtgttagcctcactattcaaactagatrtctgggtatcctttggagaacatttaaggtagaattgcctatgatgtcagctctactgaaacatgattttattatatgtaacattatgaaatgactaaaatctccaggtggagtttaagtaatcattcccattgattctcaagctgggatattcttcaaaaaatcattcccaggctgggtagtttatattattgatataattatgacaccttgaaaattcaggagagcattaaataatgtaatgcttgccgcaaaccccagtgttccttacactgcagagctgcactctgattagagtaccatacgcatgagttttggaatctacgaccagggttcaaacccagctctgccacctcatagctttatgaacctaaattatgtaatatatataagcctaaatttgtttttttctggaagtagagttaatagttcctcccttatcatatttttatgaggaatgtagtacaataggtgaagggattaacatagtgcctggaacatagtaagtgctcactaaatggaaactatcagccctcaaattatttctgttgaaagagtgtttcagcttctaaggaacgtagcaaggttctggactcagggatatgaccagcattaaaagtatcatgatcaccagcacaggatataattatatcttggtctcagagactcttaagtttatccgtgcccagataatctgccagggattgatggcaaggaaagtaacccaaaccactctttctttctgagataatacaattacatccatgatctgaaaatcatgtctaaacaactacgtgtaactgtccttcatcaactctatccatgtctacacyaaagatgatgttgggtgttaaaggtattggataaaatacaatgaatgtttctgagggctatcatgaataaactgagggctgtggactaggtcctctggggtacataaacttacagttattgccatgttatatgatgtgctgtggaagtaactaaagagaccataaaggtgaagctcaggagagcactgcagagccgtgactttggtgtgagtcctaaagaccagtaggaagtcatcagacagagctgcagttttggtaaggggccttcctagcccatggaacagcatggcaaatgtgccttcagggtagaccctagggagtcttttcaataaaataaacatgacctaccaagttcatgccatcaagatggcattgtgcctaacaccttagcagcacgtcatgagacctgaaaacacacttagtacccacgcggcttctactctcttattcaragaaagcatccagagctggaaacattttgccttgtttgaactcacaaactacaggaaaggagtgctggaactgtggctcccaaaggtctgtttcattattctctttatagtcttcttaactgcacaagtggggaatgagttgaaagttagaactgcccagcttaagggcctcttgctctgaagtgacttggagaactaacagttccccaggcagctaaaatctactgaacctactgtagatctttcagtaaaaagtttagctgatgaaaagtgtggtttttaaagcaccatttgtggctcaggtccaggkttgaatgatactccttatttatgaacttctgtatagctgctgtctgtatggcctcttgaaggataagccacagtgaggccagccttttcttaaatagggaatgagggcaacaggasaacagtgaattgttagggggcaaaccaaattggcatcattttctttgagcaaaactgtctcttacttctgggggaggccccgagcatcccacctgttcttgcgaatagaggatgtccatcccaactctctcttctccacacacccattccctgttccctaccccctcatgattcactagattaattatgcaccacactgaagtgatccccagggtcatgccatcagaccctcatygctggttacctgttgccaaaatagtccaagttcccatgccatttttccttcatctatttgcttatccccatattgcccagtgtattctctcatttgcttctatctccaatggcctccccctgcctaggacttttccattatcccctctagatcttacaatgccatcaccctcccctatgtcctcttctctgaatcatggttgcctcctgaagacacmatcttccctgcagccctctcaagcctagctatcttcctctctacaacctgcgtatcattggcctgaaggggagacatcttgctttgctatttgcagctactttcagacctttaatccttcttcctctctaatgaccttcttacaagcacatgtctccttatcattgactgaatattctagcacctaacccactcaccctccccactcatactccattcaccatcttggccactcagctccttgacgacttttgaaaatcttgttctgccgctgcctgaacatcagccaccacactcatggttacactgcgtactgtgtcatgactaatcactggcatcgccaacagttccatttcaagcatcccacgctgtggtcatcacttcttctctctctagtcactccccttagcaccatcactccaaattggtaagttttcagcgactatcatcccccatttcattacttccctccttgaccagcttagcttctatggttccttctcataattattctcttgcccccatttccaaatcccattatgtactctcccagcactgtactactcttttgagaattaaaaagaaacaaattgcaactctagtaattttttcttactcttaacctgtgcctaaaaaaactaaacatgactggagaacaaaagaccaccaagttgacctgtgttcctttgtatttatatkaatatggctcacatggttttcatcactgtccagtaacttattgtcacagtttccaaggtcaatttcacacttctcaaacttccacaaactcttcattgtctactgacaaccttacttctatctttactgagacaacaaaaaaaaaaatcagatgagtatgtacttatgcccatcacgtcaccgtattcccaaactacctgcctctgtgcacaccacctcactgcctgctgcagttactgtccagggccagcgcctctgcccatgtactggagcctgtccctccacccttttcaagcatgttactctatcaaataaatatccctttctcttttgcattatcagttttgctatctctctgttggccccaccagcactattacccatgctatattagcttttaaaaaawtctctcaatctcacatttatctccaacgtttacatcattcttttgctgcactttgtagaaaaatattttgaattttctgtatctatttctacttccttacttcccatgttttcttgaactcactcgagttactcttttcttgctcaatactggatagaaactgctctcattggggtcatcgatgaccttcaaacagatttagtccaactgtgaatcttcagttcccattttactcagcctctcaataacaatccgcccctgcccattctctcacttttgaaacaccttctttacttggcttccaggacagcacactcctggttttccctctacctcactgaacattctggaataccctcctgttttctgaggtctgtatgttggagtgagaggcatctccatctttggttttctcttctttaactacactgtcttttggtgggctcatacaggctcttggcttttaatactacttataaactgattactctcagatttctgtttcagctcaccctcttccttgaactccagcttataagacactcctgctactccacgtggattttttttttttttctttttttttttgagatagagtctcactctgtcacccaggctggagtgcagtggcttgatatcggctcactgcaacccccgcctctcgggttcaaacaattctcctgcctcagcctgagtagctgggactacaggcacatgccaccacacccagataattttttgtatttttagtaaagatggggtttccccatgttagccaggatagtctcgatctcctgacctcatgatctgcctgccttggcctcccaaagttctgggattacaggcgtgagccaccgtgcccggcctccacttggatatctaataaacatctccaactgatattccaaaaacaaacatgattttctccccaatgtttttctaacccattgttcatcatctcagtcaactgtaccatcatttacttcatggtttaggtaaaagaatctagagccatttctgatctcttgcttttatatcacaatatcaatctatcagcaaatcttctcagctctgccttcacaataggtccagaattcaaatccttctcaccatctccttttcctagtctaagccccatcatgtctttctggattaatgttttatcctacgatggatttttttgtccccattcttatctttcttcctaagagtcctctttactcagtagccaaaggaatccttttaaaaagaaaatttagcttatatcatttcctttttcaaatctaaccaccatcttcccatatttagaatcaaatctcaagatcttgccatgctctgacccctgcttctctctccaatttcatttacaatcccatttactcttgttcattctgctttatccacaagactctttgcccctccttgtctatataaacaagctctccctccaaagcctgcccctgctttctcttcagagtctgaaatgcccttctccgtgtcaatagctcactctcacttcagtcaggtctctgagcacttatcccctcttctgagaggcttgccctgaccaccttgtctaaaatagcatccctttcccaccttactttttaacctgctttgtggtcttcgtacttacctctatstgacttctccactagaatgcagaccatgtgaaggcagatttgctgacttcatcacatcaactatgtgtacctagaacagtccttggatggttgacgtgcttgataaataaatatttgttgcatgaatgaatgagtgaatatttagagctctatgtcaaatttctggttcagatgttcagggatgttctcagttggaccttttaataaaaaaaaacaataaatgaccaaattctactttaagttattttagggttccaacagtcacccatagactgaacaaactccgaagatttggcttcatgtaagaatgtcactgcaaagaagcttcagtacccattgtgatatcatttgctaatttggagattgtgatgccaaaagtataagccccatgctcagtcagcatctaggtccaatagctctcagaggaaccatacatcaaagcaaactttctgcaatgcggaaaagaacatccatgcatttttaaaatgaattttaaattttaaataatttttaaaagtggtttcatctcttgtaatggaaaatattcaaaattctcatgctgattcatgaagtatacttatataattagacaaaataagaacattgaaagaagcagactccttgtttcatcgctttaagcaaataataaaaatggactcrtgcaagtcacaccactaatttaaatacattttgtaaaaagatagcaaataaatgaaataaaaatatttgctttagtttttttaaacaaagatttattaactctgaattttttaggttaaggaccatgcaatatatatctcctacaccgaagtgtccaagaaatgtttttggagtaaattaatgaactgctttagaatgttgctcagaaattaagctagaaattcagagcaatattctcagggcttgatttacaccaaatccaagttcgcaatgtattaacatgaaggaataggccattgctttctgaaaaccttccttttataaaagaaatactttaatattatgaattctcttggtctgtgtaaaatattatttgcattataaaaattgattttttggtataattgttcataggcaatattttcaccaggatgggttcacaagtgttaatggaaggcgaattatgtgtgggacagtcttctagggaatatgtgaggggtttttaagatggataacattttgtacctgcttttgagttgcaaatgatctggactgttggttaaacatcgcagacaagatcaggtgaagaacattactagaagttcagtgattaagaaataaagccacgtaccccacggagtgaaatttgaattccttaaattccctcaaattattttatgttggattttacaccaggataggaatgtctttaaaagtaagaaatatttgacataaggtagaaaatttcaaaggagtgtttgacttgttgctggatgtgtcaccacatttcatgtgtctgagaaatataaatttctacagcacatttttagtgccttaaacagactacaatgatgtaaatggttgaacagttgaaatttagtctggaactgggacagatgacttgccacatagagtggctcccaacataaagtgatctgtgatggcaggactttcagcgtgtttcactattagcatgtgtcatccaagcatgcctttcaacatctgtggagaaaagacatgttacaaatacaaaacaccaccatgatgaattgggaatgtcaaaaacctctgccttggctgtgatccagtgttgttattggcaagtagattcatccttctaggttggttgctccataagtaatcttcaagaaaagcaagtccaacacccttttttctccttactgtgaacttggtcaaaattaccaaatgtttggtaaccatttatggtatcaggaatgcaccaataactccttctgactctttaagagcaatcatcttgtggaatgcaatttcccttcttattattgtgggtatttttaggtacctatgcttgaccttttttaaagagagtaaggatctgtgatttaaactaggatagaagctgttccagagataacaaaaagctgttgctttctatattccaacaggaactaggtaaaacgataaatgtgataactcaaaataatgtgtatgtttatcttccaggctttctaatagttaattggttaaataaaacattatttacagaaatagaagagccactcctcaactgttcaaacactgcaaagtaaactaatgcaagtgcagtgacctcttcatccagccacaaaatcatatatatttttaattctccaaggagtttgagatagtaaagttggatatcatgtagctaaacaaaggcttttaccttttctcttggaaaatagttaaaatgaatagraatctgataattaatctgggaaatttaaccctgctctacttacctaatgcccccccaaaagatgatcttttttttcttcattgattttataccttaaaaagaaattactgaattgcagatatacaactagtatctacagacagaaatgmaggtcagttttagaagaaaccagtgtcaaatgaaaacacagatttctacatggtcacattcatatcacacactcttgacccaaggtgagaaagtaggtcattccttatttcttatttattccctggcacaatcagaccacactacaagtttcttttaccagttgccaaaatgaaatcatgacacccttcagagctactgtcgttacatgcaactcaagacaacgagcagcatcataaccattgtcaacaggcaaactccaacaatgtctgggtttggatttggttttatgttgagagaagcagatttcctctgattttaataatccataagaaacagaaatcataatatattgactccatattacctaaaaagagtcaaaagaagcagaagttctcccccgattcatcctcttgttccacagacattttgaaaataaaagaagacaaaatagaaaggaaagggtgtgagaaagaacacagaaatgacttgaacgatttcaaatccttattaagcatcactgaggttgcattttacccattagactgactgaatttagttctcactgctcagaccttgcaaagaaactggacgtacatggttttgccttccagggttgatctagaactgtaagggtgcatgtgaatgtgggtatgcatgtgtgtgtgctttaagtccattttataaacactgacacaagacaattctcatcattggtaatagtctttggagtccaatcatgcagaaaaacaggcaggtgcaagttaggtctcattgcaagatggacatggcaaggtgaacagataatcctacataaggattgggagatttgtgtccattagaatatactggccattggtcccacataagtaaagttacatatacaagattctatatataaacagaggcccctcacttcagtttggctgaccaaagaaacaggtcaaagtgagccattttcagatagttaaaggactaagtaccaaaagaaataacaaaatcttatcctctaatcacaaagaaaatagctaaaataactatttacattgcaacttttttgttgtttttacagagaggagtttccttgcttggcttaatgatatctgtggaaaatgttgaactcttataattaaaatgtgtgtgggggattgtgagtggggagttgggttcctctttggatgcaaagtggctgagatcaaaaatttctagagcaattttactcctctttctgagctgtagaagaatacatttttcagcaaagctggctaataacatgccttacagagcataatgcacttaagatgtggcttttcatatgttaagagattcaaatcgaaatagattttgtataatttaggttttgcaatgaatatttacaattttaaaacaaatcaagtttgcttatttttttttccttgacaggacataaaaggttttacatatttttatctattttttactagttccatttactaaggccaactttcagttttaccagtcagctgctatcagtgtctttagataatatttttctgataacagattgaaaaaactatcgagcttcttaaccctcaattaaatagcttactccaattggtgggaactggccaggctctggtccaactgttgggtacattcctacaaaactcagtcatcagattcttgaagatgaaaggttattatcagtttttattccacaagaagaaattccgttgtaaggctagtgtattcctatttaaaattgaacacgctgacccacaaaacacatataaaaatagtaaagacatattaatagtaaagtggtggcggttttgccaaactcttgcagcagtttaattttccctgcacatgagtacacagccatccttcctacaaaatactgcaaactattttattaaggatcactgcaaaccaactgccccaaaggaagcctaacagaaggttaggctcctcagagtgccaacttcatgttccaaaatgagccccaaccccaggtagaaccttcactttttttcaggaatattgtccaggtgacttgacacttgcctaccggaaaagttgggatgttcttgggaaataacaggtgactatttaagaaatatttggkgtgtgtgtgtgtgtgtgtgtgtgtgtgtgtgtgtgtgtgtgttaagacagacaagtgaatgcagaacatattatattctgtgaatttgataatatcatcacctcctagacatattataggaaagcagacctagtgggcaaaggactggggggcttttacagtggtgattctctttgttgttccatcatctgccttgctttaatcacctaataaaactgatcctgcaaaaattctgggggccaaatccttacctctatttgtaaatgatacttatattcaaggaatttgttccatttttctcttgtccataagggaaatctggctaaagctaaccagctcccaagagccatgcacagaagatgtaagactaattgagctttgggaaggtactaacagcgggggaggggccctgtctagttcttgcctggtttacyctgagggggaaattcaccacttatgcaggtacgagagatagcctgtcaagcactttgaagatgctggctggagacttccttctgtcttgtgatgtcatcttgcggctgatgaaattccccttgagactctctttaaagcagcttcctgctctccgcacttaatcccatgtggtataaagtaagggaggggagaagccacagatatatcaagagaaaagtaccgagaaagaaaatcagtaaagaattagagatacagagaggagaagtttttaaaaaaaaaaaaaaaaaacaggaatatgaaagagagggagctcaagtgactgaggaggcatttttaacaatcaggttatctgcaatattaaccagaaaaaaaatggtagcaaaatagagaaaatgggccatttttattccaggggacaagctgcacaaaggaatgttcttctatttattttaaacaaatgactgcgtgtactgaatctgactgtgtgaaataatctcagaatggcagcaccactggyatggcgatggtgcaggtgggtgcagttccctgtggtctctattgcttgaagagagaaagraagttccctattattatatttaaggcagttttcagagcactggcattcttgtttgctctgttttggggatattctatttgccaatcagttcacactcatcaaccatccacttcctgtctttcacttcttcaggtgaaatatcaccactctagtgagcaccaacatggtcagagtgcaaataactgtgatggatacttcgaagtgaataagaagggaagcctgattattgctgagatcaccttggtattgccttgtacataaccaagatgtttcacagtgcctccttaagtgctcaggaaagcactttcatttaatttaatttaagctaaattctggagattttgctaaacattgacattaatgcttcatggcttttaagacaaactcatattgctaaaactatttggcagcagtaaatttatgggcagagttattgctcttacatctactgcagtacaaaactcagatgatcagcccttcgattgctcatacttattaaaataaataaataaacatgaaacatcagccacattaaggagtcagggaaactcctgaggaataacaatgtctctggagatgttttcaaatgctaacctgagactcacactgtggtttgggggtttcattmttattattattattttatttcagaagaggaaagtaatattatttctcaaaataaaactttggcagagtatgaatcagggaagcagcccacacatggaaaacacaatccacaatctgaaagtagtctaggcaggctcatttttttgttgaaggaattcacatggaggcaattctgctcagttccagagagagattcttatcatcaaaagcacacacaataaccttgcttcaccacctgccactttctccagtggcctcttgttgtgaccagtaattgagaaatgacaaatgggtatagagccaaatctctaaaacagggacaccagtgtctcctagtatctgggtaataacctcctttcagtcttagtccacaccacacactaccctccagtctctcctactctttactgtcacagaaaagactctcagcttttattcacacctgccttcwgaaggccaaaccattttgtgcctgaaaactgttacccactcsccccacactttacataagtatcacatatgttctttctacaaattggtatacaggtgccatttaatccattcaaatttggaagctacatcttcaagggtctgagagagctcactccccccatatattccccctttacatgttttcttataagacatacagtttaatcaattaacaaactaaacagcttatatactggcaatatattacagatgggtttatgtcagagtaatagatcacatgaaatggacyatgtggtaccccagtgcattatgtcttggtagagccytgaggacactgacagtagcatctctaagtaagtagtgctgtatgaatacagacacatgcggatctgtatctacatccatctgactaggccaaggagcaggtagatgcaagatagagacacacacatgctggatggggccactgcacaccttgtcatgccatttaaaagggcagttacaggttgccggttttgcagccattaaaattacactttatggaaaaggcttctctaattgtgtctgatttgctttctgtagtaagcatcattggaagaagaccaaagcaagagcaactagaagttaaatatacatttgagcttagctgcaatacagaaccctggggaagaagcaggctgaaagatttatttaattttaggcttggattctctcccttgctgttttcttgatgttgtgtgtctgcatttgtgtgtgtgtgtgtgtctgcgtgtgtgtgtgttccatcacatcatctcctgaagaacgctgggtttcgcaggcaggcggctagtcacctgcaacaacccaggggtcctgccgaggcttccaggctgctgtcagtgtcagatgccagggtctggtcggtggacatggaggagatgtcattgacagacgaggatggagggagactctcactgctgttcactgctgcacctgtgctaagaaaatgaagaccaacatgactcaatctagaaccagacccatcttaatgccattcaggattcagggatgggcaaatacaataggggatgtccagtccatcaatcatttggcaagcctttatagagcagctgacataggggagcatatcaaatggtgacaatcaagacatagcaataaaaagtccttcatcacaagttatcaaatctcactctatatttgaaatcacctgcaacactttctattaaaaaacactaatatctggtcacattgcctcccctgcccccactgcactgcatatattttaatataattggccttgggtgaggccaaggtatttgcatttttatttatttattttttttgagatggagtctcgctctgtcgccaggctggagtgcagcggcacaatctcggctcactgcaacctctgcctcccaggttcaagctattctcctgcctcagcctcccgagtagctgggagtacaggtgcgcaccaccacacccagctaatttttgtacttttagtagagatgaggtttcaacatgttggccagaatggtctcgatctcttgacctcatgatccgcccacctctgcctcccaaagtgctgggattacaggcgtgagccaccacgccccgcgggcatttgcattttttaaaagctcctcagagactgtattcagccaagcattgaaagcctctggcttatgcaggagacaaataagcaaaaccccttaatggagccatctgagcctggttgtttttaatgcagggagcttttaaaacaaacatatgcaagggtcctatcccagaaatagaagctgaagtgaagttcagaaatctgaattacttggggaccacatctctagagaaaggaagatatataaatactattatgtcatcattaatgacaccaaacttaaaatgcatatagaaaagccagtaggacataagtaggactgttgatgaaagttacaaaaaaaaaaaaaataggagaagccttagcacagcttttgcttatgagctaactctccagcaggcttgcttacctgggatctccaaataagaactccaaattattaacttagattaacttgaaaaaattgtttatctgttatgcgggagtataaggttgaaaccctgagaagaaacctgcccayggtaatcactcagtaaaggctagctgagttgccagtagctttgagatcaacaaaagaaagatgaaccaaaggcattgtgcgatayaattaaaccagagcaccctggaaacaatccatttactttttttctttgtatattctttatacctaagcaatctgagtggtaacacacttgctttgtgaaatagctcgctattaaaaatctgtagtatagtcccctaatcaaataagagatgaggaattctcactaaaattatatcttatttgagcaaatatagtgtgcaagatctatttggtgaaaaataataactccaaagtcagttataatagtgttatcacatagacctaataaatcagaaagacaaaataaaactaaattaaggaagggragtggttaacataatccttgctcctggagtagacatttcttgcctgtgagaaaagtgtgatgaaaatgtatcagttatctagagaggacacaaacacctaaactaagacagatcacctgtatcttccatgtatttttaagttgtatttgttgactataaatatatggacgtactctatgggaaatgtgaaaaaatataggaaataaagataatgatatgcaccgatcttcaaataaayggtaagaactgttaaacttttcatatatttcttcccggtcattctttttgcctggaagtttccctggtcgtgatcttttaatatgtatttttttgggatcttgatatttttakatacagaaaagcttatgaatttttcatgttctttaaactcctaaaaatacccatcctttctaatcttaaatgtctctagaaaaggtttttaaagtcctcytgttattgtctttctgtaaataattactctatcaggacaatgtataaagttataatattccataatattccaactttgaatggctttaatttattccaactttacttaattatatcccccatagctatggtacagagctggttcatttcccctcatgataagattttatctcctagcagacagcccttggttcctttacattgcccaaatgccctgctctgtttttcacccccgattctggattaaattataccaayatccttcatattctttcataagttgctaataatttagtgtcactatgatggactcctcagaattctcttccatttatccacactcttattaaaagacagagattaaaactggacacaggactctattataaaggcctgatcaattgtgagcctagcagagggaaattgcttttttcttactatttgtctgctggatgacatatccctagactatggatgcctttcaaattatggtgctacagcttaatttagttttgacttgaggtatagaatgatgctcatatattttttgtaacagctttattaagatataatccacatatataattaagaaatttaattttcatgattcagtgttttttagtatattcacaacattgtgcagccatcaccacaatccattttgcagcatttcatcatccctaaagaaaaccctgcactccattcctcacctaccctgtagctctaggcaatgactcatctactttttgcctctataaaattgcctgttctgaacatttcatgtaaatggaagcatatcatatgtgatcatttatgactggccactttcatatagcagaatgtttttaaggcttatccatgctgtggcatgtatctgtatttcatatctttgtatggctgcataatattccattgtatggatacatcacattttgtttatttattagttgataggcatttgatggatatttaggttgtttcaactttttggctattacaaataatgctgttatgaacattcatgcacgagttttgtatggacatgtgttcatttctcttgggtatacacctagaagtggaattgctggggcatagagtaattctagctttaacacttgaggaactgacaaactgtgtccggaattggtgggttcttggtctcactgacttcaagattgaagccgcggaccctcgcggtgagtgttacagctcttaaggtggcgcgtctggagtctgtcccttctgatgttcagatgtgttcggagtttcttccttctggtgggttcgtggtctcgctggctcaggagtgaagctgcagaccttcacggtgagtgttacagctcttaaggcagcgagtctggagcttttcgttcctcccagtgggctcgtggtctcactggggtcaggagtgaagctgcagaccttcgtggtgagtgttacagctcataaaagcagcatggacccagagtgagcagtagcaacatctactgcaaagagcaaagaacaaagcttccacactgtggaaggggacccaagtgggttgccaatgctggctcgggcagcctgcttttattctcttatctggccccacccacatcctgctgattggtagagccgagtggcctgttttgacagggtgctgactggtgcatttacaatccctgagctagatacaaaggttctccacgtccccatcagattagatacagagtatcaacacaaaggttctccaaggccccaccagagcagctagatacagagtgtggattggtgcactcacaaaccttgagctaaacacagggtgctgattggtgtgtttacaaaccttgagctagatacacagtgccgattggtatatttacaatccctgagctagacataaaggttttccaaggccccaccagagcagctagatacagagtgtcgattggtgcactcacaaaccctgagctagacacagagtgctgattggtatgtttacaatccctgagctagacataaaggttctccaaggccccaccagagcagctaaatacagagtgtcgattggtgcactcacaaaccttgagctaaacacagggtgctgactggtgtatttacaatccctgagctagacataaagactctccacgtcctcaccagactcaggagcccagctggcttcacctagtggatcccgtaccagggctgcaggtggagctgcctgccagtcctgcgctgtgcgctcgcattcctcagcccttgggtggtcgctgggactgggcgccatggagcagggggtggtgctcgtcggggaggctcgggctgcacaggagcccatggagtgggtgggaggctcaggcatggcgggctgcaggtcctgagccttgccccgcaggaaggcagctaaggcccggcgagaaatcgagcacagcgccggtgggccggcactgctgggggacccagtacaccttccgcagccactggcccgggtgctaagtccctcactgcccggggccagcagggctggctggctgtcccgagtgcgggggcccgccaagcccacgcctacctgcaactccagctggcccgcaagcgccgcacgcggcccgggttcccgctcgtgcctctccctccacacctccctgcaagctgagggagtgggctccagccttggccagcccagaaaggggctcccacagtgcagtggggggctgaaaggctcctcaaatgccgccaaagtaggagcccaggcaggggaggtgccgagagcaagcgagggctctgaggactgccagcacgctctcacctctcaaaactgttttctaaagtgggtgcaccattttacattactaccagcagtatatgaggattccaatttctctacatcctcaccaacacttattatctgtctttttatctagccatcctagtgtgcatgaaatggtatctcattgtggtttgatttgcatttgcctgatagctaataatgttgagtatattttttcatgtgcttgtcagccattagtatatcttctttggagaaagtttactcagctcctttggccattttttaattgctttattttctttttattattgagttgtaagctctttagctctttcttcctttctttcttgctttctttcttctttatttctttttttaaggacagggtctcagtcgcccagcctgtagcacagtggcatagtcatgtttcactgtatcctctaactccagggctcaggcaattctcctgccccagcctcccaagtagctaggactacaggcacataccaccacacctggctaattaaaaaaaagattttttgtagagacaggagcttgccatgttgcccaagctggtctcaaactcctggcctcaagtgatcttccgatttctgcctcccaaaatgctgggtctacaggcatgagccactgtgacaggcctgtaagagctctttatataatctgggtacaagttacttaatgagatatgtattttcaaatgtttttcctctatgctatggtttatcttttcattttcttgaaggtgtcttttgaagcacacatatttttaatttttatgaaatagcatttatctgttgtttcttttatcacttgtgttttagtgtcatatctaataaaccattttctaatccaagattataaaaacttactcctatgtttttgcctaagagttttataatgttagaccttatacttaagtctatgattcatttttagttcatttttgtatatgatatgaggcaggggcccaccttcattcttttgcatgtatatatccaatcatcccagcaccatatattgaaaaggctattctttgtccatgtcttacatccttatcagaaatcaattgatcataaatgtaggtatttattcctggactctcaatttgattccgttgatctatttgtgtatcttcatgcaaatagcactctgtcttgaatattgtagctttgtagtaagttttgaaatcagaacatgtaaatttcccagctgtgttgtttttcaaggttattttggatattctgtatcctttgcatttccacacaaattttaagatggggcttgtcaatttctgcaaaaaagacagctatgattttgataagtattggcttaatctgtacatcaattyggggagtatctgtcatttcttgacaatattaaatattctaatccatgagcaatgaaatgtttttccagttattagatcctctttaatttctttcaacaatgtttcgtagttttcagagtacaaaacttgtacttcttttgctaactttattcctaaatatgtatttcttgatgctattctaaatggaattgttttatgttcattgctaatgtgtagaaatacaattatactgaggacttatttgaataagaagtttcagtgtcagtggattggatgttaaaaacagatcaaatgaatatatatatatatatatatatatatatatatatatataaaatgaatgttgtaattaactagaaagccagtggaaccaggcgattatgatagcatgctttatttatgagaaaataaccagttttaaaaataactggttttatgagaaaataaccagttttaaaactttaaaaagttttaaaataaaattgtggcataatacaaaccaaaaagtatttttaagtctttaataataatcttggtcttctcttgagataggctttttcccctatcctggctggagttgattatgtagacacattcttattgtcacaattaaagttgagtaatgattcaaataagggtgagataagtcttagctgaaataaggctcccttatagtaaaacaatttgatgtttacaaataaacacaaacccacaacaatggcagctagagaaattaaacaaagagcattgaagaaatttctccaaaacacaaatttatatctacaaataatattgaatgtatgtaacaaaagccaaagtagcttttaataagctcttcataaacaggatcgtgctgcaggctatgcttataaaacacacagcactcctactgcacttattttcaaaatcagcatattttcagcacacttctggaatattccgagtgttatgccataccagtcagccccttattatatgtagttttgttatggattacctcaagcatatatttcccctgcttctttttactgctttcattatacttcatttctcctgtcttccacaatgtctactgctgagtagtagcacagagtaagtattcgagttaacaaaacagtattgagtatcttatgtgtactcttctagataggttctgtgaggaaaagcaagttccttcctgctttccaactagtgaaactgttaagctatttttggccaaaggaaatcactttgttgcagttgtctttcttctccttttgttcatcagcagcttctctctaattcctatcctctgtgttggaatggtcctgccctctagtttatcaatgttgaatgcaaatataattagtgttcaactactcaaagttcaaaatctatcaaagtctttatcagctgtatttctagggatccatagactattgcttctgattttatatggcacaaattcattaagagaagtcttcagtgcttyctttgtaaaagttcccatgacatctgcttgtttcatgggaatggttccttgctatccagtgtgatggtgggagagaaccgtgcactgtctatggtgtcctggagctggcttttagtggcttcttagaacgaattattagcatctctttccaactctgcatccattgatgttacattgttgcttaaaattggtcacagtgagaatatttataccacaggaattgttaagtgctactagtcaattctttttttaaatatagttgttaaatgttaaccagtccaccactattagatgaaaactatttgcttctgtatgactccctctattgcgctataataaatgcctccttgcctgcagccacttctgctggatgatccattcaagwctattttcatgtaggcaataaacaggagttctaaaccataaacccaaacacaaacgtaagggacaagacatgggccttggctttaagttgttaaattactgccaagcagtttgcgaaaatctcttaaacagaattgaactgaattgaatatgatcatwgtgttcagttgtccagtcaatgtgagaaatatctcttctttctatattatttaagagaaaacagtagagatacacattttcaaaaatgttttgccatcaataaagcattacaaatttttgtctataaaaatggcattaaaaggaactgaaaatgtcaatagggttgcaaatgaggaatattagctaccttcaactttacctaaaaaatcagatttcatagaaagaagtaacatatgctaaagaaaatttctcagctacaagttattcaaccaaaaaacattgttatgggggaaaatgttgttctgctttttttaaaggcaatgattttcctgataacccccaatcccaacaacaacaaaaaaatatggtagacacagaattagaaaaagcacaagaatgaaaaaatagtgtcttttttatctacatgatcttgagccacaatttgtctgggcctgagattttttaataaaaagtaaataaaattaatggactatattagtgaccctaagacatattcccatggtggggaatgtggtcctcactggggagagaatggttgcatattaaaatcacccagaagctttatctttgayttagagattttgaaaaatctctgcccatcctgttgttcagcatccttatcttagtgagtcactgttagttttgggagctttacttctcaggtggaagagggctggtgaacaaactcagaattggtgaatcagatgctctcctgtattttttctagttctaacgtactataacaaatgcttttagaagaaaattaatttcaattcatggactgctagtccctcagcaattgttacagatcaattcaggaagcaagcagctatgccatccttgaaaataaattactatgcaagtgaaatcagatagcagaagggaatacaattatttatttggaaatgtatctgaagtttagatttatctcttattgacatacaacaatttcatcaataaatttcaaacctataaattattctgcaaatgcacatttaacttcctatttacattttaaaagcatcgcataacatgggtttcgtattagaagtacttggcccctgagatactgcattaacttactcccttgctgcagaattcccagtattgccataactgaatactaacagagtgtgtgttataaaaataccacagctattttcaaaataaaatatgctacgtgaacattaatgaaaaaaagctgaatataatgaacaatgcaaaaaagctgacttttcaaacttttttttagaattgctttttctttccagcatagtttattatacacacaaaaacgcatacacacagtggtgcgccaataaaaatttaacaattggctctgcagggggcaacaaaaacgccctgatttgtagggtctgccaatttccatgttgtaaatccttcgtgcctgatttcacgttgccaacacaccaacaataaatgcatagttgggaagagaggtacagagttggccgtcatgagctggtagagtcagcgccagcacatggctgccctagagcctctccatcatgcacataaatatgtcatacagaaatgcatcccataatgtgtagcatacatatgatttctcacgaaagagaaagtcatactacatgacttataactaagtcatgaatatttttcctagatttaatccacaatcattttaactataaattggttaagccagtcaactatagtttagggcatatgtattacatagataatttttaattgttaaggtagttggaatggttaaaaagtggcttagccttctcactcaggtagagcctaagttgcatattttagaattaatcattaacacactaagcaggcctgcaaaacatccatgaatatatatttcccaaaatgaataaatcaaacacctgaaagctgcaaacctttatgtgaagcatgaaaaaatgccaatagcaagaatttatatactttatgcttggcctgtttatcttcatggagattaatagagtgaataaatatttataataatggtgtaagaacatgctgaatagtatactgtattaaagttacatgatcttgtcttgaattttgtgtttggaatagtactaagaaatatgctgagggagaaattgagtggcaattttcaaattaatatatatttaytgagctactactatgtgcaaggcacagcacccaggcactacatgggacacaaagataaatgcatacagtcttctcaatgaaattacaatcaatamgggataataagacaagaggtcaaatatttaacatacagggactagtaggacctatagaaaggaaagatcctattatttgggaagatataaaaagtcttttgggataaggtggtatgaaaaggaaatgaagtaatgataacttgaactgaagatgaatagaataggttctactaaaatttgtccaggcccagcctaacatgctaggttacccgtggctacattctgttatttctgctgcttaatgagtacatgacaatatgttctggtcattataggaattcttaaaacaaggagtcattctgccttagcaggtggcatcttgaggcttttggattctgtcttcaagttttttaatgagcaacaggccaaacgtggattagtttgaagcagcttctgtggactgtgtcaatctgtatgcgagggtgaatgagtagagagggtggtatggaaaacaactcctgtgattcccttaaccttctttgaggaagggaaaaacttgggataaaactgagtattttttcaagtctactggtgagaaaagcatgtcataaccgaattgcatctgtttgggtatcatagtggtttggggtgtaaattagttattcgaagagtagtatcgatatgaataattgattaattatttcattctacatcttttttcctaaaataatttaggaaaacaacaccctaatcagtttttctcaaaactaggcatttgtagcccccatttttgctagcaggagttgaatgtagtttttaaagctgaaaataaaccawcacattttctaaaactctttatagtgagagcataggtcttaggaaaaaatatattagcattaataagtaaattgtctcaagtcatactaaagcacattactaggatcagtaaaaaatatatatgcacaattgtgtattagattctgtggctagcaaacgaaaaattttccaagctgaccttaaccggagcccatcttggtagatgtttcaactattgtcacatcaaccttgagaagagttcaaacactaagaatgaatgagggaagaggtagcggctgaaaggattactgagctccacattgacttgatggtcaaaagggcattatggctctgaattttgatgaggcacatttaccctttagcccatgttaacattttcttcaggattcattactattaaaattatttatgaaaaagtttttgtrctggatcattaccatcagaataatcagaatgaatgccacactgaatatcaaaagaaataaaactaaaatcattataaggacacaaccatgtgatatttgtccatctgctctttaagcaatgttatgttatttcttgcaacccctacacaaaggccaagaaattacacaagtactagtttattggttattcacggagagtgagtacctgaaggagaaggctgtccttttactacaccatttttagtcttttcttctgaattcattacttccttgtagataagttctgtaagaaacagctgtgttattatagaaaacaaatttatccttcatccacagggaaattcattacttaatgccaaataattacgttttgatggggttgagtaaattaaaaatcarttgagattcctttactgctctatttctatttctatattgccttgtaattarcagagagcctggcacaaataggtatctagtaaagcagttgaagaaatcaatgcatgaaaatttatttctacgtacatgaaacatactatttatttccatatacatagtatttatttctacatacatttctacataaataacatttatttctacatgcatgaaatatttctacataaatgaaacaagtaatacatgttttacttgttttctgaattctttgggggaagtactaatacattctagctcaatctagcaacaatttttatggctttgaacatccatttttctttatacttatttcctatgaaatgcacacattctcatgactttaaattattaccaatccttacaacttccatctcttactgcatctttttttttttccagactcatatcttggacttgtaaatctaaacttgccaaaaaccaaacacattaaaaaatttagttcatttactctcagactggcatccatttttggctttctgaatgctagagttaaattggatagtttcagttctgtttactctgtccctttagctaaaaatcattccgccctactcattcttgctttgcaatggcttataatctgtataatcatcatcctttacatgtacttctttctccaatttctcacaatttagtccatgtcctcctcaaatgatggttatatcctatcacccacctattcatgagcccctaaggagtgccttcctgtccttacttggatcaaagcaactctttttcatctatatcaagcatcttttttcacttgatccactttttgtatatgttcatttttccatattcaccaacatgaccctggaatctctggaccagtggaatctctttagtatcttttaaaatttttttattttattttttattttacatatatatatagagagaggcagagactttctctgtcacccaggcttgagtacaatggcacaatcatggctcaccgcagcctcaacttcctggactcaagtgatcctcccacctcagcctcccaagtagctgggactacaggtgtgtaccactatgcccggctaatttttgtatgtttctagcagagacagggtctccctatgttgcccaggttggttctgaactcccgggctcaagtgatcccccagcctcagcctcccaaactgctgggattacaggtgtgagtcatcgctcctggccctgtttagtatctttataacattttctgcttattcctgtcctttgttttcctcttagtcctttatctgatattttcttaatattttttcttttcctaatttacacttattaattcctgcaaggtagctcaaatgttccttcccttcagctcttcccattttgatctgatcatttgctacaatctgcatttgactttctcatatttattctattctgtagtgatttagattagtagattagattaataggctactcagatacacatattttctatgtaaattctcaagtcttatcaatccaatgagtaaactcatatattgactatcttttattttctaaagtctaaaaccatctcagaattaattttaatttcatgcttcatatgatgattttatgtacaaacatagaaagttgtattctggaattctgaactaaagcttgccccccaccatgacaaacactgacaatcagtaccattttaaaaggtatcgacaaacactgacaatcagtaccattttaaaaggtatcaatggtaaatgcctttcattcttgagcaaaygtgacattgctttcggcmtgaaaagacagatgaagttttaggagctttaaaaatggtctaagagaatagcagtcagcaaatcattttttagtaaattgttttacaaggaaaagccttgttgatactttctgagttcaataaaataaaaagtatacttttttaagtagtagacttacctttccattcttcaattgtgtgttctctttcatccaactgcttgtcatayatctgaggtggaggctgccraataaaaacaaaaaataatctttgtgtgataatgtaaacataactaaactcttacaaygcacgagaataccttgccctcatttatttcggtgatttcaaccgtatataagttatgaggaaattacagtagttcagaagttaaaattttcytgtaaacttayggaggattcattcatattgcaatatttgctgctgacccaatattgctgcaatatttgcagcagaacgcaaatcccgagagctcactttccgacatcttctgatttagaacccacgcctaagcaattaatgactggtcttttaaaaaacagacaaaacacttgattacaatgrcccagaagctacttttccttcaytcacttgccttataacagaaccatgctaaaattcttctaggctaataagattttgttctatttttagaccttccctaaagaaaagtttatatttctcaacagaccatagtactagtcctcaatataaaaaaaattgagatcaaatcaacctttttatttttcatgaaataccatagaatgtctttatatattgctgtgtgccctatacttaaacgattttaagctttttggtttgtttgtttatttgttttaacctgcagaagctgccatgactgtagaggtaggtcaccttgaatccctgaatggcccttggttagtcctctctagcagaaatgatgcaatagggccttcagtctgacttatagagccagcatttctcttcccatgtggagttcaaatgtggaaaaggagggattttcacaaacctgcgtgcctactggaaagtggaatctcaaataaattctctgacctcttcttcctgatatttaggctttgggagatctaccatggcggctagggtagctccaattcaggccaagtgatatggaaagaaaaaaaaaaggctcttggaaaaataaatcaccatgaggtagagaaagaggaggctgaggggctacactggctggcaccggtttaagcgcaaagaagagctatcaagtttttgctaccccgtccaatactccaaaagcaatagtttttgtgaaaaactaaaagagtcactcaataagagtgatgcaacccctttaggacacagacctttcaaaaatggctattatagtaaggaaagctctggacaagattttcagagacagcttctggcttctgtgagagctttttggctcatgaacagcaccctcgggctamagtgacccttctctaattcatgcagaatctgtggtagcttgaatcatgacagacacaaatattcatcctagccctggcatgctggggcctcacatcctgcaaagtatctggctatgaaaatagaagactttgccyggctgtggtgaagtaacttagcataatactgaagtattgagaaataactactcacggagccagacattcttttagcacgtttgactgatactggggcagaaggctgtaaacctcacctactgcaattcagatgtggctggctgagcagctctcagcagccgtcagcactgacaactaagcaaaatgagactctcacaccaccccagacaatagtaagaacacaacacattgaacgtatataaggtgacaggactgggatagtcaggcactgctctcaggacctgactgaggtagaaccttccacctctataaaggactctcaaataatagaaacattctgacttagtgagtgaatgagtaaaatgaagttatttttgaaaaattgtgaaaccattacctaaggaagctaccacaaagccaaactctggttttgtaaagacgctttgccaagtggtaaatttccggctttgcctcttcctgagcatgtataatgctgtggttaggccgctatccaagcgaccttgtccaggacccctgcaggacacagtgtacataagctctcagagcccccagagccctctgagctgttggcacctccttcttcttctaacaatagatccagctcatgatcctgcctggctggcttctccatgcagtggatttttccattcaagttttaaaattgaacatggctcaagagtacagttcctgccaaagttcataaatgccattttctttttgcaacaaagctattttcaggaggtttccctaggagcctcagtgtacagctgttgctgatatataaagcacaaagtacatagacactaatcacaaacaaactacaagagagaatgcaaagtgctgagttcaagatttttcctttcaacaaaccaagagggctgctttaaaccacttgatttayagtatttgttcgacggcctctgcaaatttactacatattcagatttttgattgtttgttttttgaagaggaaatgcgaatgtcacctccagtgaaagggcacattcacatacagatgtcttctatgtgacaatataaaagaataattgaccaataatccagagagagcaatgttacaacacacacgtataagtgctgggcagcaatcatcaggatgagatagttcaaaacattccctgcctccttccgctaaggagaagttggtatttgagcactcgcttgtgctctttccctatcttatttaataggaattattcttttgctaagtgacaatctaaataaaaaataaatgaggagtggggataaagaaaaatgccccagaggtgtctgttgagagagtattttaggagagtttagcagataagagtaattgagatgtgagaaatgaaggataagaggacattaaagatagtatatgaacagttatcagggcctgtgactttcaccctttgaatattttttcaaaagactgtaaacttctttcatattattttggaagatttgaacttccttggttgaaattattgcagaaattcaaacacaaatttatatggattgcataaacaataacttaaaatggattagacacatttttattgatggttaatttcatatgaatttatattggtggtcaattatatgaattttatactgatgaaacatgtccaaattgtttcaattaaatgaggaaaaaaacacaaacaagtacatggtcactgtgaattaataaatactagaatttatttatttctttattaaatgtattcattcagtaaaggtcttgggcacctaacacatggcagactatataaaaaactgagatttcaaaattgaataaggtgactgctgaccacaaggagttcacaatttactggggtaagactgatgcaaaacagatcattagtatacaacatgataaatgatagaaacctgtatatggtctaagggaacagggtggagaagtcctaacaaagcctagatttgatttcctggagtaaagtgatgcttattcagtgagcgaaagatgtgtgggaggttgtcaagataaaagaaggaggaaaaaagtgactccatgccaagagcacattataagccaagttacagtatgtagaaaacagaataggggtggtggtggtggtggtggtagtggtagtggtggtgcatgtgtttctctgtgtgtacatgcatgccaagaaaacaagaaggaattttgtcacagtaaaataaaacatgtcgtcagaagtgacaagatatamgagctgtacttagagaagcagaagggtcagacaaagggtggatcaaggatgatccagggggccaggcgctgtggctcatgcctgtaatcccagaactctgggaggccgaggtgggtggattatttgaagtcaggagttcaagaccagcctggccaacatggtgaaaccccacctctactaaaaatacaaaaattagccgggcatggtggcaggcacctgtaatcccagctactcgggaggctgaggcaggagaatcgcttgaacccgggaggtggaggttgcagtgagcccagattgtgccactgcactccagcctgggtgatagagtgagactctgtctcaaaaaaaaaaaaaaaaaaaaaaaaatgatccagggtatcatgatacggaagaaagaagaagagaaaccactgaggaatgtaagagaacggaacagtgaaatttacagctggattgaagaaagatgtaactgtaagcagagagaagaggtagggagccattgcacgatctataaaaaaatattgaaagttctgactgcggttaaaaaaaaaaaaagatgagggtgaacgaaagacacagattcaggaataattaataaatgttaataaataaacttggtagaagttggtttttgattgaacatatgtgatgggagagaagaatatgagtccccaatttctaagctgagtacctgggaagatgatcgtgttggtgaagccatctaaagaaatagagaatggaaaaggggaaatgagattggtagaggtgagcctaagtgttatgtgagaagagatgatgatttgaaagttaagtatataatctgaagttcagaggaatgctgttggctagagatgtgtatagatttgagactaacagcaagtgatgtttgttgaaactatgacagtggatgaggtcacccagggaagatatgtgggtatagagagtaaatggccaaattaaaatttaaagattggacagaggaaggtaagttcactaaggcaaaagagaatagctaaagaaatacatgaaaaatgagaatattgcaatgttatagaagtcaagcaagtagaatttcacaaaaagctagtaattggccatttcttgcaaatgaagcacatgaggattttgactcgcagggcaccagaaaggcatgatagaaagcatgcctctgaaccctttgaaagctttccaaactttaaattgctatcacccccagaaagatccagatagatcttcggtggaggacgttaatatgagacatcacctaaacaattgaataaaatgtagaaaaagatcctcaacaccaatataattaaaaggaaagaaaccatagaacaattgtgacactagaaaaactataatgatctcagatctactctctcaagtctctgagaacttgataaaaaaaaaaacactgttctctatctagttaaaggaagtcactttttttctgagaaaccaccatatgttaagctgtctttatatagaccttaataatcctcacagtcaggaaactaagattcaaggaaattttaaaaaatatatcatgaagtcatatagctaattaatgatgaaacttttattaaaacccaatttaaagagtaatccagagcaagtgtcaatactgttgaatctaaaataaagactaataaaacaatatttaaagtgaacatctttgtaaaacaagaaatagaaacataagccaatagggtgaccatatttcccagtttgtacaaaatagttccattttatgcttattgtccttgtaattattagtagcacttacgcccttcgctcctttaagtgttgtggtttggagaataaatatgtggacactctacatagcaatgttgtgacatggcatgttagagatctaaggtatacagtaatttgaggacaaagaaaacaactgaattgcaatgtttttctaccactgaggtttcaacaattgcagctgtaccttttccttctctgagacagcacgtcagcatttccttccattttctctatttttagaaacgtaaaattcagctataaaatatggctgttggcagacagtacagacaagagtagaattctgcataataaatctatagttgaaaaatatggattctgtgggcattctatggagttcttgctgttggccatgactttctactaaagcgatctctttaacaagtacctgttcaattcctaattgagctttcgaaggtaaaagttgctctttctgcctgtaatcccaggcctttgggaggccgaggtgggcagatcacgaggtcaggagatcgagaccatcctggctaacacagtgaaaccccatctctactaaaagtataaaaaattagccgggcattgtggcaggtgcctgtgttcccagctactcgggaggctgaggcaggagaatggcataaacttgggaggtggagcttgcagtgagccaagatcacaccactgcattccagcctgggtgactgagcgagactccgtctaaaaaaaaaaaaaagttgccctttcttgtgacttcattcattttatcccatatatataagtaatattcattgagtaaaatgtgtgaatttattttttactgaatctttgagataattttcaaagatacatgggaagtatctttttcaacagcattataggatattagtggtaaaagaaagttcagagattatctaatgccacccttattcaattttcaaatgagaatatagaaactgagaaagcataagtgatttgcccacaatcacagagttaattagtgacagatgaatacatttatggtctcttatgggaaaagacagaataatggaattcttatggttgaagaaacattaaactggataatttgacacctgtaaaagatattcattaaagacaaatttgtgcctgccacacactgatttctgttccaattttctgtcagtctacacttacagctagagctggcaactatcatacaagcagtcaacacttacattcttaaacacttttttgtcaaagtatcatggacatcaaagacctctaaacacatgaatctctaaagagataaaaaccagatatgagaaatctaagttgtacaaagttgttcctttgattcttctttgagccctgaactgacatttttccctaacacttatgctctgaaccatatgacagtccatcaagttgttggtgtttgtctgctttgtcctaattaaggatctccctgtgttctgctgccttgtttaaaatgtcaacaaaagctttaaatagcactgtatctcagtgtgtgcactcattattaattcaacatctggatcaaagtaaatgatattatatcttactgaaatatgctttgttttttcttattaagcttggcagttagatgattgtcaaaagatgcatgctttattaaaacgctttaagcaagaagggtatatcttagtacaaaattagatagaacaggaaatccattaaggaaatatacaacattttgattttatatttccttgaatctctacacatagagttttctaattttttttttcttaatttgatgactaggacttgttaaattttcaccaattaattagaaaataaaaattttggtaaaatgactctgatgaagcacaaaatgatatgcacttttattgttttatttggctaatggcacagtttagcatgtccaatttttctctaaagccttatattctctgtggcaccaasagcagttcattaccccaaaatggagctcagtatttgtttcacaaatagtcttaccaacaatcgccaaaataatgaaaatattattgcaatatgcacaattatcaaaagaattgattagatataattaattcctatgatttctcagtaatgtgaccttactatgcattaagcaatgacctggtttccaattaccaaaaacttcattgccttctgaatgtagatatatggcattttgtgatgtactatccgttgattattaaaaattgcttcagcaagtttcaggaactatgtctgtgttctcaaacagaaattaaataatatactactacagattaaataaatgccttttaaaagtatgatttgaggagatgtcagcaagatgataaaataaggctctccagtgctccctctctcacagaaacatcaatttgaacaactatccgcacacaaaaataccttcacaaaagtgaaggaaaccaggtgagagatttcagcacctgggtatagcacggaaacaagaaaagatgcactggagagagaggaaggacagtttcacattacctgcttcacttttcccccaattaccagacagcacagcatggagacagataccctccacatgatggtaggagaaggaagtgagcatcagactttgccttagaccccaacactgggcctgccacagaaaaacccagcaccaaagagaccctcacagccctagacaccaggctagtacttgtggactgagcttccacacctttcccagcactgatcaggggcttatagccttagactcaaggtctatacagcagacttggtctctgggccactctactgccaggtctaccttagcagcccagcctctggaacttctccagcactgggctgtcccctataatcctggacatcagatccatcccagtaactgactatttcctgcagactcagactcaaagccaatcccagagccaagtagccccctgtggacccaaggataaggccagcctctacagatgtaggcaaatatttgcagacataggcgtcaggtctgcccttgtgtacccaggtttcaggcctatccatggggactcaatcaataggtccacacttgtggatctagacttaggcccaaccctatagacccacccacctgctgacccaggcacccagacaccaagcccagccaacctacctgaggactccaacagcaggcctacccttagacgacaccaaatggcatgcacaggttctatggaaaggctgactgataaagagttttcccagacaaagccagtctgcaaagactggaataagcccttacttcttcagatgcacagacatcagtgtaaggaaataagaaacatgaaaagctgaggtgacataaaccaccaaaaaaatacaaaaatctcccagtggctgagtcaagagaagtggaaatatataaactaagagacaaaaaagtcaaaataattgttttaaggaagctcaacaaacttcaaaaaaattacagggaaacaatttcataaaatcaagaaaacaataaataaaacaaatttaatagagagattgaaattatttttcaaagacaaagagaaatcctattgccgaatataatgaatgaatgaaaaatgcaatagtaggattgatgaaggagaagaaagaatttgtagccttgaagacaagttatttaaaaatatatggtcagaagagaaaaaatgaaaacaaatagagaaagtttatgtgatttatgggagagcatcaaaagagcacattttttagttcaagaagagaaagacaaaggggtaggaagtatgtttaaggaaataataacagaaatgttttcatatcttgggaaagacatattcacgtagaggaaagttaaagttctctaatcagattcaattcaaacaagattacaccaagatatatcataatgaaatcaacaaaaatcaaagacaaagaaaggatcctaaaggcaccaagagaaaagaagcaaataacatttaagggaatgttcctatcaagctagcagatttttcggcagaaaccttacaggccaggagtgtatgggacaacataatcaaaatgttaaaataaaataaaaaaactatcaattaggaatactgtaccccacaaagttgtccttcagaaaaggagagataaagtctttccacaacaaaagttgagggagttcaccaccagacctgtctcacaagaagatgcttaagagagttcttcaggctaaaagaaaagcattctaattagtgacacaaaaacatgtgaaagtgtaaaactcacttacaaagataagtacacagtcaaactcacaacaccctaatactgtaatggtggtatgtaattcacctatatctttaccatgaaggtgaaaagaaaaaaactactaagaataacaatagctacaataatgtgttaaggcatctacaaccacctgatcttcgacaaacctgacaaaaacaagcaatggggaaaagattccctatttaataaatgatgctgggaaaactgcctagccatatgcagaaaactgaaaccagactcgttccttacaccttatacaaaaattaactcaagatcgattaaagacttaaatgtaaaacccaaaaccataaaaaccctagaagaaaacctaggcaataccattcaggacataggcatgggcaaagacctcattactaaaacaccaaaagcaattgcaacaaaagaaaaattgacaattgggatctaattaaactaaagagcttctgcacagcaaaagaaactatcatcagactgaacaggcaacctacagaaagggagaaaatttttgcaatctactcatttgacaaaggtctaatatccagaatctaccaaatttacaagaaaaaaacaaacaaccccatcaaaaagtgggcgaaggacatgaacagacacttctcaaaagaagacatttatgtggccaacaaacatgtgaaaaaaagctcatcatcactggtcattggagaagtgcaaatcaaaaccacagtgagataccatctcatgccagttacaatggtgattattaaaaaggaaacaacagatgctggcgaggctgtggagaaacaggaacgcttttacactgttgctgggagtgtaaattagttcagcaattgtggaagacaatgtagtgattcctcaaagatctagaaccagaaataccatttgacccggcaatcccattactgggtatatatccgaaggattctaaattattctgttctaaagacacatgcacacatatgtttattgcagcactatatacaatagcaaatacttggaaccaacccaaatgcccatcaatgatagactggataaagaaaatgtggcacatatacaccttggaatactatgcagcaataaaaaagaatgagttcatgtcctttgcagggatatggatgaagctagaagccatcatcctcagcaaactaacaactagcacaggaacaaaaaaccaaacactgcgtgttctcactcataagtgagagttgaacaatgagaacacatggacacagggaggagaacatcacacaccaggacctgtcagagggttgggggcaagggaagggagagcattaggaccatacctaatgcatgctgggcttaaaacctagaagctgggttgataggtgcagcaaaccaccatggcacatatttacctatgtaacaaacctgcacgttctgcacatgtatcccagaacttaaagtaaaattttaaaaaaaagtgttaagggatacacaatataaaaatatgttaattgtgacatcaaaaattttaaatgtgggaggaatggtggagtaaaagtatagttttttaaaaatgcaagcaaaaagttgttatcagcttaaagtagcttgttataactataagatgtttttgtaattctcatggtaaccacaaagtaaaaatttatggtagagacaaaaaagatacaaagtagggaatcaaagcataccaccagagaaaattattttatcagaaaaaaaagacaaaaaaagaggggaagaaatgaacaaagaacctacaaaacaaccagaaaacaatgagctaaatggcagtattaagtccttacctattaataattaccttgaatgcaaattgattaaattttccagtcaccttggatgtgaagggggctgagggaatagaaagaaaagactccaaggtatctcattatccagatgaaaacctggatagaaagtagtgccatgaattggaaggaggaagcatagatttggtgtrgagaggagatatggccagtttaatatttaatatgttgattttgcaatgccaatttcaattccagtgactgttagatttatacatctggaactcaggccagctctatgggacgatgtgtagaattgagccatttatgataattaaaattaaggctgtggtggaagataagactcccagagagaaaagaaataagggctataaagaaaaaatttctgagatgcacaattctaagggaagagagaacaacccacattgagcaatggaggctgcaggagaacaggtgtgctgccaccacagaaattaacatgcaggggtgcagaaaggaaggtgttgtcagcttattcaaatgggcaaatacatgagatacccatttttttggacttggcacctaagaggccactggtgaatttagagaaagcagtgtcaatgtttaaaaagtgaactggagtaattgtgagtaaacaaggactaatgttttatagagacttggctataaagctataagtcatacttccattgctaaaggtagaagtgtagttaaaaataaaggtttgctttgattctttgttctttgaaatgaaagagactagaacatgtttatttgtaagaagtaattgccactggaaactgaaacataggacacacacagagaaggaagagacccacatgcagaaaacaaaggctataaataaaagagtacagtgtcctgggttttcctggatcttgtgtaaatgactccatcacagcattatcatgttttcttctcaacatcttcatcattctactaccattcgtagaaagtggattttcatatattatctcatttagtctttgtgacaaacctcctattccaagtatgcaactgaggcacacaaagatttaaaaatctatgagttagtagcagaggccatatttaaacccaaatctaactgaatacaatgtctgtgttctttgcatttttccaccccaggcttatagttcctactaattcaacctattgaaatatattttaacgttttattaggcaaacaaagcaacagagaacagcagggaaaaaggcgactttatctctagctgacggggctcttgaaatgctgttaatcaggattctagatacaaatttccacgtccactcagaggggcgagaatgtgcaatatattgtgatgctgccaccttgtggcaagaaaaaatgaaaacattaagaggtgctttgtgtgcatatttatcattttcaattaaattgctctagtttatggttcagctacggctgcacattgaaatcatctgggagttttaaaaatactgctgcctagatcccacctcagagattctgatttaattgttctggggtgaggccttggtgtcaggatatttttaaacttcccaaatgattctaacatgcagcaaagattaagacctctgctctaaccacttatacagtagagaagcaagtcttgtcatttgcctagttatgtttcatttgtatagacgcaaaagaaaacattctagagaaagtaggtgattttctctcaatctttaatggcatctagttcttggtagaatacaatgatttctggacagatatatcatatactatgattttaaagaacaggacaaagaaatttgtgaattgtaatcaaagtggacacaagatttgtgtctcataatcaaatgcagtccgtagactaaagtgagcagggagaatctctgagcctcataatgcgtcacaggttttctgaaaggaacaatggaaagagcactgaagcaccattgactctggcactagtaagatgagtgaccttgagcaagtcactcagtttgcaatgaaagattttcatctactgctttattcaagagaaactagttccaaatgttcaacaaatatcataccaggtaattcaacaaaactttcttaagtacttgcaatgcgaaaagcatggaattataatgtgttataaatggaaagcactaatgttgcttagagacatcatagcattaggtgaccagaggaacctttgaaagctagtaatgcaaattttaattatgatctgaactgagtgtaattagaaagcttaattacataatgctccagtggtttggcaaagaagttgaattcagttttctctatttttcattctgttctgtagttttctcagatttatttattagctctacaccatcaaaaagtgtaatcatgtcttgaaaatgaaatttctctttcctgctccttggaaattaaaattttctatggttctttaactgaaaagtttcagtaattgcaccaccaatcacccagtgccttggtcaggaatctttctttcttcattcgttcatttaacacatatttattaaccctctaccatatgatattactcatctttgaattccacctcccttaaattccaaatttaattatttacaattcatgtcaattattagcttctaaacatctcttgaatattctgyccatgtctacagtgatttagattactacagatctatcctcctgccttctagctcccttttctcaactccagtcccacactgcagacagtggccctttgaaacttcaaatctgctaatgctattgccccacttcctagtgaatggcttcccttcaccctaggatagcatgcatggtacatgacaatgcttgggaactccttccttatctggtccctgcttaccagcccaaaataatttctcacccttctccattaagtcactcagaaagcttaaagctttgcaattctctccaccctctcttgaccctgggatttttgcatataccctttcttctgcttgcctttcttcacttggataatttcttttttagcccttcatgttcctgtttgaaaattaatcactccaagcagccttctgtaacccacattactgggttatttttatgtgtttccaatgtacaataagcttaaaatttggaatacgtatcatcaacatttacttatttatcttctcactagaccatgggacaaagaattgagaataaaagacctaggaatccaacttacaagggatgtgaaggacctcttcaaggagaactacaaaccactgctctctatttgtctgttattcgtgtataagaatgcttgtgatttttgtacattgattttgtatcctgagactttgctgaagttgcttatcagcttaaggagattttggactgagatgatggggttttctaaatatgcaatcatgtcatctgcaaacagggacaatttgacttcctgtcttcctatttgaatacgctttatttctttctcttgcctgactgccctggccagaacttccaatactatgttgaataggagtggtgagagagggcatccttgtcttgtgctggttttcaaagggaatgtttccagcttctgcccattcagtatgatatttgctatgggtttgtcataaatagctgttattattttgagattttgggctgagacaatggggttttctagatatacaattgaaaatctagaagaaatggaagcacagtatatagtacatagtagatatccaacaagtatgaaccattgatgaagaacaattatttgcattcaaaaatctacgatatattaactcggaaaaattggtcaggtaaagagatgaaataaattatgacatgtctgacattactcaaataatttttaaaaagtagattccagcttttgatatacacatattagccacacaatcatgggcaatgtgcttaacatccattaacatcctgagctttagtgtcttcaattctaaacacagatacattcattcagcaaatattgattatatgactactaagggccagacagtgttctaggtagttgggatacagcagtgccccaaagagtcactgtctctctttttacgcatcttaaattctagttgatgagacagataataaaaagagatatataatgtcaaacagtgacacatagagaaaaaagattaagaggctagagtgtaacagagtactattctattttttctttttagtttttttctttttgtttttgttttactttttaaactattattagtattatttttacaaacacttgtaccaagggctgactttcaatagatcacagcaaggatcccctctgctacatatgaaaccctgacccagaagcaggtcatctacttatgttttagtgccaggttacacacgaatgtgtgttacatgacgggcaagggggcggccgaagagtactattttagaaaggatggtcataaaaggcttytttgagaaggtaacatttgagcagagatttgaatgaagtaaaggagggagcaatgtgaatatctggaggaagaatgtcccaggcagaaggaaatacaatgcaaagaccctaaagggggagcttgcttggtgtggtaaggaaaccgcaaggatgccatatactggtgcagagtggaaaagggaagcctaaaggtgatatcagaaaagtaggcaggagccagactaagtagagccatgttttccaaactgcagtcatgaaaacaaattggtgtcatcactagcaccttttagtgtaactaagaagagtaaaatgagatagaaaatatcagtgtatggtttttcttttgtgtgtgtgtacgtgtgtgtgtgcacgcacgtgcacttgtacacgcatgctgggttgcaatgtaaaacacccttcttactatgggttatgataaaatttgaaacaacactgtggtagggccttgcaagccatgataagtactttgagttttgttataaatatgataagaagccattggaagatgggaaggtgttagctgaggaattatgtgaatgtaacgtgttttacattttaaaaggaaaattctaggcattctgcagaatggaccacaagggacaagagtggtgctgagagataagtcccagaatattacatggtccagggtagaaatgatgtttgcatagatgaaaggatgagaagtgatctgagtcaaggtatatttagaaagtaagttcagttaagagttgttgaggatagtcatcattttctagagtttttatgaggcttaaataagattggatatcagaaagggttttataaacactagagaagtgctcagcagagtacagctgagttcaattcaaagggcatttactgaccatacactatgcacctgccattactctcactgttttctctgcactcggtagataaaactgaatttctgctcccaaggaactttacagcagtagagttgtggaagatagacataaaaatgaatcactgcagcataatgcacaatatgataatggcatatggaaggttctaaagaaaatgagttaacttaaaattctgagaagcagtagcttttgttgcaagcctttcttttcataggtaaaagatcacattagccccaaggatattctgtaggacaaatatgagctaaaaatgaactagaaaatagctctaggtgaaaaacacatcgaacacagatattgctgagttagtctattaaagccacatgtcatttgcacttttgccctacagtcacaaaacaaaagcaaatgaacaagggaaagaggatcttcagccctcctacataagtaacatgaatcaataaggagtcatcctggagaccacagaaaaccacactcttccagttagcatcaatgaatagccccaggatacaaatccacagtgaatgaagaaacatagctacagaattagaaacattattaaggaaaattgatttgagtatacttcactaatgttagagggataatattatattttaggttgaaatgtaataatttttttaattccaaagtgtctattaattttaaaatatacatactttttgttacaaatatttatttttccccttcataccactaatctctgtgaaaaagtttagaatgtgacataaaggttctaggttaatgaagtctttcaatcaagcataaagacttctgctaatctagtaaaaaccgccccttctacctacatggattcaatatatttgttgcattatataagaaagcatttgtgtaccacatttacatatgagatgtttatcagaaagaaagtggtgctctgaggagagggagatggggaacagaatcacttgagagtgaggatttatttccaattaattaacatgcccacaagaatctgccataccccacatgaagaatcattgctttaatatagattgatgagttgataacgttaatgagttgatgactgtctctcaggtatgttggggaacaaaaaagtttgagaaacaaatacagtcataaagaactatattctaataataaggcgttaccattgctcctactttttaatgtattatatacattattatataatactttttaatgtatttaataaatatatctcatagtggattttcttaaaacagagcttgccttttcattaagtaattactccaaggagtaattttaaaagaaaataagtctaactgagcttttgtgttaacatgataggaactgataacatttccatttttcttatgtcacatagactaaaactgttcagtttaaaatagttcaattacctccataagctttaagaaaaccttctttaataacatcctatgttttcaaagttaattgggtactttcacatttttttcctttaaaacattattagacaggacatttcatgggtaaagattagtgatgcaattataccaccatctctgaatgtcattctttcttcatctccattgccattgaagtccattttgtcatcttttatttcaactacttcactagcttcctaaatcatctttctactattttatcacttcatcagtcagaaagaatgatctacctaaaacacgaatcccattgtgttactccctgattaaaatctgttcccccaagcctgcagcttgggtaccctctgggaatgacttaaaaggtgtttcctgaccaggaccctgcttacatttccagctgcatttctcaccattcccttccctgctcacagtgaattaactcatagttccccaggtgtgtcctggttcatcttctctcctggccattgagcaggctgcttcctttgcctaccagattctactcttccacctccatttcacttggtaactcttgcccatccttttggtcccatttgaggcttttcttcctcctaaaaacctcctatgtctgctataggatgagttatgccttattcctttgtgtttctatggcactagtactatggttatagtatcttacttacttacatattaactctactacaaactactaaataacagaaactatgtctttttatcattagaattagtcaatcttcaatggcagcgtacacttgaagcttaacaaaagtttaagtgaatgaatgtggtggacctgtccaaggtatgatgagactttgagtccatgtcctctaattgttgacccacagtggtttccactgtgctctactgtctcccagtgccatgaccttggtctccacactctgtaactcttggtcctcctcccattgtctgtctacagtcctttgctttgggaaagctagactaagtaaggcaatattttaaattaactaattgcaagccaagttttttgcctggatttgagcttagccttccattcttgggggagctattcattacttaagaaaacctacctgtgactatgcatgtaagaattctggctaggaataaactattgttcatgattaaacaggaatggtgcaagaggcatgagcaggcctacctcagaaaaagaagtggtaacagattgctgtactatgaaaacagcattctggcatataygtcctgaaagaaagtcaccaaaagttctttacgctaacttagtcaaaaacaacacataccttaggtaagaaattttcagaaaaagtgcttgaggsttagctaatttatctctcactttttacagaggaacatcgaaggaattcagctttcaaaatgcacctaaagatagaaatcagattcttcttggaattagaaactgtggggagcatcttttgattgttgattgaactcatgttgttttacatacattatattctctttcacaatatattgtgggtcattattctacaaacaaccctctgagtctcatatgaaacctgcagcaagttatggaagtggcttttatcattcttacaattgccctaccattagaaagggacataataattttattatagcacatactcctggaaagaccataaacttttaatagacttgtaaaaagggagtgtaaccttttcaatattctgtctcatctattctaccttctcctcacatataacgaatgccctagggcctaagtcatggatctacacttgggaagaaaatgttgagattcagccttttccctgaatctgaaggttaccatgatttagcacccaggaatagtttctgcctatcctttttctggttcttttgcagctctgcaacttccagacttgtggtctatgtagagttgtgatgacattccgacttcatgtctatagctttcatttagggatttttaaatgtcagcataaacatcctacagcgtttaaagttgtcttcacatcaccacacatattcattttcagcatcattaatgattacactttctgattattttcctttctctgctagactgtcaaacttcttagtttacttcctaatattgatagcatcaccagctctaagcatgacttctcaaacaagatgtttggttaattttctgtgtgtttttgttgttgttcatttgatcgtctcaactttttgttgcaatgcacaacataaccaccttcttagatcatggacaaagaaacaaacaaaaatctttggagacaaacatggcagaggaaaataaatatcgcaaaggaagtgagtgcttccgaaaaacaaagtggaaacaaagtatgaggaacccctgaaagcctcacagcataagaaaagaactagctacttgaagagtagacagtggctattaatttctatttcttgaaaaaaaaataccattttaaaattgtcrgggaccacaagaaactgtttttataatgttaatagtttttttaaatcacaataataaaaattgaaagcataatattttacatttatcagttacttctgcctccaccactttccttaaaaaaagtaggacttttacagatgaaagagcattttaatacaaattttaaaattacccgaagacaataaattatttcctaaaacgtgtattaaatctttttgttatgtctataaatgataatctagtctaagagtaacttatcagcatttttgcagtcccctccccccatccactgaaaactttctttactagactcatgattttcaaaattttaagaattaaatttggagtaaaggaactccgaagatctgaaaaagcctgtgaactggatgtccagaaagatgtaaatacataattattgatagaaaattttgggatgtttttcaaaagcccccagaagttcctctaaggaacccttaggggtcataggaaagctcagtgctgggtagtgagctcctaagagcagagaaatgccctcctgtgtgcatctctagatctggtacagtttcagcattcataggggtgctataaacatttgttacgttgaatcatggaggataagtatgtatatactcgggtgttgttgttgctgttgtttgagatagagtcttcctctgtcacctaggctggagtgctgtggtgcaatcttggttcactgcaaactccrcctcccaggtttaagccattctcccaccacagcctcccaagtagctagtgtaagccaccatgcctggctaatttttgtatctttagtagagacgggatttcgctatgctgcccaggctggtctcaaactcctgagttcaagtgatccacccgccttggcctcccaaagtgctaggattacaggcctgagccactgtgcctggagggtattttttttttaaaaagaagaatgtagtatttaaaagttcatcatgcaattaaacctcattgattttgagagcaaaggagcaaagaaaaatctggcaaatagcaaacctactacttaaagtaaacctttaggaacttaagcagggctgctcaccaaataattctgctgggtacagaactgatgtggcctttaaattacagagtttatgtataataattaacatccaggccttgcagaaaacaatattacctctgcagagcatatcattttctttattgataaatgctctttactgaaaacacaatgatatgaggatgggtaggagtgccttagagctctccttgaacatgtatacacagtggttaagaggagattctttgatgatggacaaaaattcaagtctagtttgattgttttagcaacattacaggtaagcaaacaaggcaggaatgcaaattaccaaaagagttatgcttcctagagattccccaattttgtagcctctacttatctcgaggcaaagctgtctgacagagattctgtcttctgacatactcctattcttttctcttttttattcttcctcttagtataaaatttggtaaattttagttaacagaacatctcacaagttcccaccctgacttctttgcttatttcatagaaggaatsctaaaaaagaaaaatatatatttttttctcccacagtttatggattacatcctatgcagatgacacgttggataatctctttttttccaggatgaaacatattaagaaaataaaatacactctcacaaatgcccactacctcaagataaataggtagatctcacaatatctcagatatcacctaggagagaagaaataaaatcaagtatttggaagaacctgacagaataccttagccatacctcagcctttcagagagcaacaggcatgaaatgttttagaaaaataatttctgttcccttcccccttttcataaagtattctctctcagtgatccattcaaaagattaatagcactcatggtctaaagtgttcaagataaaacatgaaaacaaaaaccaaagcatggattctactagacaacaaaacatgtctctcctaagaatgaacaattcaaccattccagcttttcacacctgagaatcttggattcagtggattctgaatatcccaatgaattaaaattaagatgaacctttctcttcaggaatagaacttgctaaaattagagataaatgagttacatattttcagtgaaatacatattcctattataagtcatatagggagtgaggctcctaaaagcaggtggctaactctatctacaacaaacattttgacaagctcccaccaacataatacatggcatcaaaacaatccgaaggcaattcaaacgatagcttcacgttaagcagctgaggcactgggcaagcaaaatctaatgaagctatattttctctggaaggcaattagtaaactgctcatattttgctgctgaaagaatacatcagcatgaacagatggaaatttagaactccacaaatggaattacagacattgatttaactttccccaagcaaatgaaaaccacaaaatacgaattgctctttctataattaagcacataattagagtgcatcagattcatatccattgtagctcatatttcttcctcctcatttctaaatttatatatattctgagtctaacaaacctacttagagttcaactccacactgaaagagtcttctatgacagatagatggtactaaactatttctcaaattaagcctgccatgggtcacactagctttttcacagcatgacacatgcggcaataataagaaatccaaagactcaaagaggtagtccttgtggcaggacagatggagagaacagctgagggaggaattcagccagtttattaactccatgtgagtagaacaaatcatatttaaaagaattcataaggacatctggtcgaaaaacagaatttaaatgatggcagttttagaatggagaaaagagaatcatgatgtctcacagtacaatatcactgagttacctctttgtttttctacttccaggaaacaaaaggtcaccagtgacctgcacacagattatagaccaaactggtgrtgggcacttgggaaatacttggactaattgtcaagtttaaaatatacaagaaatactaaaacatattatggaaataaaatcactaacatgctaaacattacagatacttgaaattattcacattgttaattattcttttcctcattctaggatacagtagtttgtcttacttgtgaaaatatttaggggaacttagataaaatttttgtttgatattcctaaaatgctagaaatgacctcagaaatctttttgagaataagccctttataaaaacctccaaataggtctttcctgagaaaactcaattgatgtgctttatcaagtataatagtatgtttcatttataagctttccaagttgaaatccaaagtaataagcatgtttcaaaaaaaatctaaacaagtaaaaatggggaaacttactaaaactgtgcacacatatatagcatcaagaaataaactagcagtaaaatccaaggtcatattcagtgtgataggcactgcagatcttttctattaataaaaagcaacagaggctttttctayccatgaaatgtttttttaaaagagctttcttattattttagtgaaatgaagtttttccttcttaataaaaattttcaaatttctaccaaaaaaaatccttaagtaactcaagttttgcagtttatgcttatttaaatatttgataggtattttctgccacttgagagttgctattaaattttatataataaacttcacttgcaaactgacttccttctcagacaaatcaaatgacagcaaacaaaaataatgcctattaactattttaagtacattactgtaccctgtggggaaaatcaggaaacaaaaactgtagtttcagaatttcagatggattagttattcagaaattgtcttgaggacatgccctaaccttttgatatcactcatcaaaggaaaatgtgactcacaaagactttaatcccctttcctcccaacgggagatacagtctgtatagagagctgtttgcatttataactcayttaaatcatgtcttccagatacttcaggtttaactcacagtgctacactcaaactaaccaatttaataaaaggattataaaatatttgaagcaaacttatgcatattttattcaatggtttatctccaaacagtagatatctactgatgaactatttgaacattagatgcatcaaattcatattcattgtagctcatatttttccttatcattcctaaattcatatatactgagtctaacaaagtacattgcttctagttataatcaaatatatttataagtctattcttcaccatgttgtttcaggaatttattatggattcaagagaattcagtaaaagacaactggttaagccacagttaataaaggtagaaacaatgcaaacaagaactcattcatggagtagatttaatagagcaagtaacacaggatattcataatcaaatgatattagcttttacagtaaaaatgtatttgagagaattaaaagtcagtgataataaggaatgagaataactccttcccatcatcctcagtcatgtgaactatgctcaaaggcttcagatggtcaataaattaatacatgaatctttaaaatataaattaaatatttttatttagttgctatagtaaatagaaagatttaatttatagtttaaagattgtatacttttatgtttagtatagcaactttaggattctttggttttcagtaataatctatgcatttgggtaaccaaacttagtcagcttggtcaggacttttttgtttatttattttattttattttattttattttatttattttttttaagacggtctcactctgtctcccaggctggagtgcagtggtgcgatctcggctcactgcaacttctgtctcccgggttcaagcgattctcctgcctcagccttcccagtacctggcactacaggtggctaatttttgtatttttagtagagatggggttttgccgtgttggccaggcccaaactcctgatatcaagtgatccacccgccttggcatcccaaagtgctgggattacaggtgtgagccactgtgcccagcaggacattattttatattcagtcaaataatagtttaaaaatcatagctaaaagtggataagcataacttgttaattatgattcaaagcagttgatgcacatctggttgaagattagcagattctcactgcagtttagttataactgattaacatttcaagggacataggatttcagattctacagtcaggaaaccatacaccaaacaagttaaataatcaagtaaggtagataattcatatttggaggagtttattttgtttcttcaggagatgataagttatcaaagattctcattcaatagaaattgctattaactattagaaacctaccaagaacaataaaagcagggacctgtttttttttcattttttgtttaaaaattcaatgctgaatcactatcatctaggtcagtgtggaacacaaagtgtgggttcagtcaatatttatagaataagtgaataaatactaaactgttaacaaatagtcaaagcttatgtgaataactctgttggataaaaaagagaaaagggtaagaagtgaagaagagataaaaaaggaagaaataaaaaagaggtgagtgagaggaaagtgaaaagttctttcctagtgaaagaggtctttcctatggcagcagaagagtagatttacagcaacctaaaagaaaacagatggctgaatcctttcaytccccttacgtacatgtggtccaacattgtctcaacaagactgtagccctacaaccaacaatcgmaagagtgacatcaacacataaaaggaaggaagtgcacattcagtggaaaccccaatgagaaatacgcttctgccaagactatcaggttggtatagtacttgcgatktcttggcaagaaatcatgaaatacttgaagaaattaaataattattagggggatgcttacttcactttactaggggaggtccttgagtacctcttctaacatctaaagtcttctcctctccagaggaattgtgctccgttccctggttacttctcctttacttagggatttcagaattgtgaataaggaaagaatgacctggtaagtgccagccctggacacatttgcccacagatgctgtcctccccctttctttagttgctctttttctcagggggctggactctattaggccatatttcccagatttgtctgtcagttgccttaggkttggtctcagccaataggagggagatatcaccaggagacagaggggagaatctaggccatttctccccacccttttctctagaagcagctgtatcttacctgtgttagtgactctagctcccattggacaggccattactacctgggctccagtaaatcgccccctagctctcaggttggtagtggcttcccatttttgcttatctctgtgttggtccaagagtgtctgcttttgacttctgcattgcaatatgagaacatccttatctctgacacctttaaataccccttagggtctcatctacttagatctctgatcttagaccacatgtctctcctgactrcccagctggtcttgactgcttggcctacatatctgcatcagctgtctctctggaatgcccagatcaagctctggaacctgttctactttgaccacaggcttctgattcccttctctctttcttctgatcccrtctagctctattccattcacttcatcatggttgctggtcctatagctgctcaaagttgaaaagttgctactctgaatgctgatgtttgctgaactgcaggacaaaaccactctataattatctctaagttcccacttcagatttaccttgaatagattttaggcataataggcatacacaatatcaaagtttacatatttgtgtcacaagaagattaaaaataaagtatatttcccacatgattggtcatcccttccatgcatcctctttggtaatatccagtaagatataatggcagacaagaagatggataaaataatgtcagatagtaactctgctcacagggcatggaatctatgatggccttgtaataaaatagcttaatatagccaggttaacttgtttctataaattctttcaccgtaggcaaaaataacataatccctaaagtagtgaactagtaaataataataattaagcatttaagaccctcttaatcactttacattataaacaaacagtaaatgtgtaatagtgttgactattctgggctcatgtttcttaagtgtttattttaattgaacttcagcactaatacatgtaactgttactctgtttcccaggttatactctccctgggaatctgaagatcatgttgtttaattcaggatctgtatcggtagattaaattcccacccaaccctgtcccaattcccaaattaatcttgagttaggtgaaaaaataacaagcaagctcagcactggccctgtttaccaaatcaccttccagccaaattggttgaattagttacaccttttctcttagtctagtggaggatgtcgtgtgtccttagattcccaaacaaaacwtgcccgctctctctctgtggtctacattatagctggagtacaatttccaggcctcatttccagcattctcttctggaactttcatttggctgccacacagaaggccctatgtttcctgccagctgtcctctgggttctcaagtaccccaggttcacctactagagaaaagaattccaaaatgccagctgcccaagcagctctacctgcctctctgccctgattcccagagtaaggtttcagccattaagaactgtctctgggcatctctgaaacacagccttcaacacaatggtctatctggttgatcaccactggccatgaagcttggcctcaacgcctgtcccatcttaggggatggttctaatctcaggtctagctccttccttttagtcaagaattgaggaatcatgaagtgttctctgactccatatgtttgtactaggcttcttcatgatgatttatttgagttttgatgtacttggttttggctgaactcacatctccctctcctgctccctctccctatgcccttgcaaggaacaagaactacaaaatggagccttttgtaaggccgttgcactcaggagctttcttgaagtgctctgaaatttctggcagaaataaagctatttaaaaaaaatagttacagcttatgttcctcttcttctgtgccctgagaaatagttaatcaactcttccttagcttggagttcacccagatgctccttaaggcttatctgtagctccactctcagtggtaaagccaccactggatcctagcagggtgcctaaactcagtaatgtggtaagagataaggcaacaaagcttcatgaacattgtattttcttccaacagggcacaaggaagatattaaactgagttccccccaaaatcccaaaaatctcctactgataatcaagatttgtggaatctataatgtgtctttattttggtttaaactaatgacactakattttcttctacctggcaaagaagaggtaggtatacattaaacaaaagaaaatgaaaaaaatggacctaaaatcatgtgggaaatagatcattgtcatcattgttcaaaaaagaaatgttgtggaatatttctgcaatttcctggccagctagtctttttcaccagacgcatatatctttttcaaatatcaaaagatagtaaagctatgcatgtaaaagtcataatagtaatagtaattataagtattataagggtaagaataatttacatgattcttactgactcccaagcatttgctaagcactttaacttttcaaaatctcagaatgctatgctgtacatatgataagaaaggagaactttcttagtttagaaaactgagttgcagaaaggttaagcaacttgatcaaagcaaattagtaatgggaagagcagaaatttaaacctaactcatctttcatacctatgaagatgcaaataagtcaaccaattacatttgtgtgtaatatatttgccctcttgatgaataytgaaccagagttagagcatcttctatttgtttcatgaaaaagcattgacattatacacgatttgtgtgttctactttgaaatcacactttgttactctaaacattatttgaataagaagttgctaataatttgagcagttatttcaaaatatttatgtactattactacacagatggattactcttgagcttggcatccaatttttaaaattttctaactcatgtgtacatgactaattttccctctcagaattatgacaacattcattcatatgctcttctctcttgatttttgtactttggtagtttgggaaacatgataagatagmtcgtagtataactaatagcttagcacacatagcatatctatactcttttgacttttcctctaaatatcaccttatcatagtttgttctttatcccctatccacttgccattatttccatccaatgaaacttatttttcttctctctcatctttgaatttccttccctccctaacagcatgtgagttacttgaaagctctttgatcagaataaaaatcccaattatttgatacttccatttatttggattataaagacatacgggggtatattttgcaaaacagtcttgtcagccccggcagaagatatatcactatattatagctttgccatgtgtccatagagaaaggttatcttatgttaaacacatgttcatatgcaataacagagacatgaattctaaggatattgcagaaagcatagctgactactgattctagcaccttcaggatctttctcttcttagttgygaccactgtaatgcacttcatagagtaataaattgttcttgccctgggatcatgattcccatctcttcactacaacatgtctagatgtaagacatgtttacccttgtataatcaatgatctgagtctagatgtcaagtacttgcttgttctgtgcattaactgtcttctttttctggaactgcaggctctatcagatccttcccctaaaattcatacatcctgccttgttactatccgtgccccagcatgaccaatatcaaagtggttaagaaaaaggctccagctattttagtatcctaaattttatcttttcattctacaaagaagtttttcataaaaagttaaaataaatttaaaaactcattgatactattcagtaagatgttatagattccaagcaactatctcttttataggcaacataattaaaagtgaattacaaatgcagactttatgactctaattaaactctaggccacaatgcattaaaaacagattatacatattaagttagatataagaaaaaataaatatgccacatagtgaggcataagttaatatgcctcaaaataaatgaggagaaacaatttcagataatacatatttatataaaatgtttatcaacataacctaaaatattttcttgaatttcatcagagataaaatttttatacttaatttttgtaaacatatacatcatactttctctcacttacttcactacttcattccatcccaagaacatctgtgcaagtatttcccaagtgtgggagactggaagaggttctatattttggttgtaagaatatatattaatttttagaacattataattaaactcagaaatatttaattgtagggatattatttggtaagaatcaaataaaatgactaaaaattaacttgaggcaacatgaaatctcaacatcattgtaaaactaagagagcagatcttaaacaaaatgtagtgcagtcttcacacttgggagattcattaatcacttaagtgttttctctgaagtttttaaatgcttaaagattgggttacattatgaaaaggacctgtttaatattgtgtctgtaaagttcaattctacctagttctcactttctttcgtatcttctctagtgaagaatgaagaaatgagaattatgtgtttgaatctagcacctctgacatggaaaaacacatggtgaagcagaggaaagaaaactgaaagaaagtgaaaatatctttaagaatacyttggggaaacaaacagtatttcaaatgaaagattaagaacaaatccaaacaaatggattggaaggtattatgtaaaaaaatatgagatgctttagcacaggtactctaagaatttgagaagcttctcatgtttaagggagaaggtaacattcctgatagaaacatttaaaggcagtgcagaaaggaaattctcatcaggaggcctatagaacacacatgggcaacagcaagccccccttgccctgctcagccctggatccatacagaggaaaggagagaggtaaagatgaaagaaagaggttgaacagaagatagtaaatggttgaaaaatatttttaaaatagaaagagttatgcttctgagaagattctccatgtctgggtatcagacatggagatacatcatactgatcaacctgaagtaatgtacttactgaaatacccacttctagttcatcwagttcatgcaaggtttcacaaagccaccaatcgttttaatcatcttataaaagctttctaattgaaatattcttaagtatcacattttactagtggcaggtatcttttcaaaaaaaaaatacaagctaagcaacttgtcctctgttgtttcctaccactaagtttgcattagaagagactggcagtcaaacacacaagaagaaacacaagtattggcaatttaacagaaacaaatggtagtgtatcatggacatctaaggtttgtaggactaaatcataccctcttctagtaagtcctgaaaaaaatgtatttaaaacatatgttgaagaaaatagcttttagaggggcagataataggctttggacttagaaattttataaaaatccattgtgcattctttaggcttctagtcctattcagtttttgctatgagctatgatttgtttgtggaagcaaagtaaaggcagcctatttcttaccgcctccacttcggctgggtcataccagacgttgatgtagggatgctgtaaggcgtcgtccactgatattctttttgctgggtcaatcactagcatctttgacaacaagtccctggcttggctggctgaaacaataaatgagaaaaacaattagtaagattttgatttcagtaaggaaatttgtcagagaggaaatttaagaaaacaaagtatggaatagtatcttcctkccaaacatcaggtaaatcccttgatgtgatggaaaagaaaatgcattttacacctgtttctttgtgtctctaagcctaaggcttcattctgaggctctccaagggttgtaacactttgggtatataattattcacgcaaacttcttagtaaaatgtatcaacctggagagtttatgtaagcaaagtcatcttctttggtaacctgcatgaatataggataaacagaataaagagcacagagtgcaaatgcatgatgttcaacaaatgtgtggacggctgtttgaagttaatcaacacgtgtgtctctatattcttatttatacaacggaattatcagaattttagtatataaattgacttaagagtttgtatcatacaaatttttcttttctttttgtttttgtttatttatttatttatttatttttgagacagggtatccctctgttgccaggctggagtgtagtggaatgatcacagctcactgcagcctggaactcctgcgctcaaaggatcctcccatcccagcttcccgagtaactggaactacaggcatgcaccaccatgcctggctattttttctttctttctttttttttgtaaagataagatctccctacattgcccaagctggtctcgaactctgggctcaaagatcctcccacctcagcctcccaaaatgctgggattaaaggagtgagccactgctcccagccacaaatttcttatatacataaaaacaatcaaagaattgaagtgatagaaataatatcattcaactactgaattttattttaacattctgtaatcatcaggtatttttaatcaatggaatcatgacttgatgaaatccagtagttaaagactgaagccagtctaatgctacaccagacactaatgagaaactctatattatgtaaaggttatcataattaattttatggttgtgggcagtaacagttataaaattatatggtgatagctatttatttagtaagattgttaaaagacacattaattttaacctctaaaaatatgtaaattttttaaattattatactttaagttctgggatacatgtgcacaacatgcaggtttgttacataggtatacacatgccatagtggtttgctgcacccaccaacctgtcatctacattaggtatttctcctaaagctatccctcccctagtcttttacataaagttttaacagaaatgaatatctcaaatcaatattgttactcaactgatctgaaagttgaaccgtgaaaatattcagtttattctaactatatggtaaaacatcaaattaaagataacaaaatttaaatggatttttcaaaaaatcaacatagatgactctggatacatatcaatttttatttaatcaatttttcagattaaaacaacttggctaattctacaaatttgaaaattatataaaatacaaaawtcaggaaataatatctaaccccactagctagaggcaatgactgtgattattggcatattttttctagtgccgttcatgtatttttcacgtaatattaaccatactatagttaaaatgtagcaattaattttttacctgtaagtattttcttggtaattacatcaataaatatatcttttaattttctgaacaaatatgaaaaatcactagttaaacttgagaattttttatttctattaatcatttttctgggaaactcaatcctagaaactgattatcattactttcaaattaaaactctgtaccgcacaggaataacaaaaatacagaaatacttatacattaattcaatatttaatttttctcattgccaatggcctcctaatagcctaacagggctgtgtttatttattcattgctttaaagacctctttaatttgtaactgattttacatccaaattcatgtaccattctcataagattctctcatcaaatctatccatttttctgctcttagaaagggctggggttagccgggcgtggtcgtggctgacacctgcaatcccagcactttggaaggccgaggcaggcagaccacgaagtcaggaggtcgagacgatcctggctaccacggtgaaaccccatctctactaaaaatacaaaaattagctgggcgtggtggcgggcgcctgtagtcccagctactcgggaggttgaggcaggagaatggagtgaacctgggagacggagcttgcagtgagcctagatcggtatcccgggcgacagagcgagactctgtctcaaaaaaaaaaaaaaaaaaaaaaagaaagggctggggttacaatggattcttcatgaatagggtcatgaactacaccaatacaaaatcatcttgctaagaaacaatactatttttaggaaacaatatgggaaaatgtttcaatgctttatctttcattctttcatttgaaagcaaatgtgttatgctcttttccaaacacagtagaatacattcttctctttggttatttgtatattaagattatttataatttgccaattttatattaaaaattaaattcaataatcaaatatgcaaactagtttatcatttacaaacataattgcagagattcaaattgatttaaaaagtaaactcaagaaaattggaattacattatgaagtataatatatatctattttttgagacggagtcttgctcactctatctctaggctggaatgcagttgcccgatctcggctcactgcaacctcttcctcctaggttcaagcgactctcctgcctcagcctcctgagtagctgggactagaggtgtgtgccaccatgcccagctaatttttttatatttttaggagagacgcagtttcaccatgttggccaggatggtctgtctcgatttcctgacctcttgatcctcccgcctccgccttccaaagtgctgaggttacagacttgagccaccgcccccggccctgaatatccagacaattctaaaatccgtggctactcccctttgtaggaacgatctttgaagaaatatttctttaacttgaggctgtgccaattaaagaattgatcaatgttttaggtgatgggttatgctaattgctctgatttgaccattatacctctatacatgtttcaaaaataccaccctatatcccacaaaaatgtacgattatcatgtgtcaactaaaaataaaagggaacaaagagaaagagatagaggtctctatactgtgtgcttgtttggcccgtcaccctcatagttgtcctcaagtcattcctgaagggcatacctttgagtttattgtgctcggagtccgctgggaagagggaatctgggaagagtttggggaaggtgagtcccgcatacttgggccgattctccacatagtttcttactgtgggttgcaatttcttcatgaattctggacatggtgttcctagttgttcaattaccttattccactggtcaatatctgagaattgaacagttaagggaaaaaagaagagcagaccactagcctttcaacaattgggagactaactcttctcaaagtcctcaacagtcattaatgcaactgtagttttaataagcaacaaagaatgaaaatataaaatcagacttgcaggctatgagtcttcttgaaattttaaattcacttttgaaacttatatacttttggaaaactagcaattatttaacaaaataagatatcatgaaatagtctttggggtgtacagataaaaagtcattcagataacacaagatgaatctcatattctgcagataaacttctatataaatcatgtgattcagaagaaaaatatataatgacacatcatagtgacatttttatcctgaagttacctcaattatttatatttttaaaatgacaaatacacaaatattttagattatattcatttacattttcctaaactatctttaagatattttttcttctctaaaaatctggaatttttttctatttttatgcatatcaacataacttttatagtaaaacaactcattagttctttgtcagattcctaaaaatcatatttattaaacaaagaagccacctatttcatacctattgttttactgatgatatcactgaatattgttttcaatgaaatataagggtgaacagaggaatattcaatttaaaacaacagatttctatccaagtacatccaagtttagaaagtacattaagcatggggaataccacagaaaaaatattacctctctatgaaaattaatacccttttaaattggagctagctctttttgcagacatactcaatgattgagattctcttttttatctgtcattaatattcgatatatcagagccttgataatgataaacaccatctactctgaagaaycaactggaaacaactgatttaaacagatttcctcgccatgtgccagtgaataatagagatcttggaaattcccttaaatccaatactgcaagcagtattctctcctacattgcttattcttctacaactgttctttggtgttaagttagttaactcatttccactaaggtaaggtgtgacagttaagggactcttaccataatattacttagttgaagtttgtcaagtctttactcctagctattcaagaggtttggactgaaaaagattgtcagtcctgattaaagataaacttaactgtattcaacaaaaagaaatatataatacaaacagtagataggagattgaacaaagataaaatcaaactaatttgcaaatccttttcttcatctctataatctggctgaataaaacttaaattattacatattctgtcagttattggaataaaaaatatataaccatggactatgaagatatgaaatgaaggtgggaaaaacaataatattccttaataaagcagtagtaataattaaacaagaacatgctttgatagaagctcatctaattatcatgtgcatgagaaaatacagcagtaattcagaatcactagaaataatgaaactaaaacattatataaggttagagttacaaattactcttagacatgagcctgtattaatactatggatataggtaagctataagtacttagacatacttaaatagaatacattagtgtagttaaataaaacctaagtgcttgtcattataaattatgaagagacattttttaaacagttaggttagcatgccctaccaagctatcatttcatcattgatcaaacttcctcaaaattctaaccactcgatgtcaaacttaaaatagaggcaaagaagatgtcagattttctgtaaataagtcatttaacaaagttggcaaaataatcccaacacagtattatatcctaattacatttgctataattataaagatatacagtaaataattgattttaaagaagtactcccaaaacaaaaaaaactgatacttttatattaaagtttaaggagagtcagatattctggaatttgttaaataagaattgttaaaatgtttcttgtaataaatcataattagaatctagagacacactcagcgctctttcctaccttaggttgcttttaaatgaaacactgttgtgattcttgatgcaatggtttacaaaaagaagggtggcaaaaatctttatcattgtcaatgaaatagttaaatgttcatactgcaaatctgagttacagtgatctttaaaagtctgtgtctttattttaaccaatccatttcaagatttttcttcccaaaaacatatgtgtgtgtatatctacatatggtaagtacttgttttctagatgttcatagaatacaaacatgaacaactatgtccaatttagttgagcacatgatttttctttctttttttttttgtagcacttgaagggctttatttttttttctttttcttttttttattatactttaagttttagggtacatgtgcacattgtgcaggttagttacatatgtatacatgtgccatgctggtgcgctgcacccactaactcgtcatctagcattaggtatatctcccaatgctatccttcccccctccccccaccccaccacagtccccagagtgtcatattccccttcctgtgtccatgtgatctcattgttcaattcccacctatgagtgagaatatgcggtgtttggttttttgttcttgcaatagtttactgagaatgatgatttccagtttcatccatgtccctacaaaggacatgaactcatcattttttatggctgcatagtattccatggtgtatatgtgccacattttcttaatccagtctatcattgttggacatttgggttggttccaagtctttgctattgtgaataatgccataataaaaatacgtgtgcatgtgtctttatagcagcatgatttatagtcatttgggtatatacccagtaatgggatggctgggtcaaatggtatttctagttctagatccctgaggaatcgccacactgacttccacaatggttgaaccagtttacagtcccaccaacagtgtaaaagtgttgctatttctccacatcctctccagcacctgttgtttcctgactttttaatgattgccattctaactggtgtgagatggtatctcatagtggttttgatttgcatttctctgatggccagtgatgatgagcattttttcatgtgttttttggctgcataaatgtcttcttttgagaagtctctgttgatgaccttcgcccactttttaatggggttgtttgtttttttcttgtaaatttgtttgagttcattgtagattctggatattagccctttgtcagatgagtaggttgcgaacattttctcccattttgtaggttgcctgttcactctgatggtagtttcttttgctgtgcagaagctctttagtttaattagatcccatttgtcaattttgtcttttgttgccgttgcttttggtgttttggacatgaagtccttgcccatgcctatgtcctgaatggtaatgcctaggttttcttctagggtttttatggttttaggtctaacgtttaagtctttaatccatcttgaattgatttttgtataaggtgtaaggaagggatccagtttcagcttcctacatatggctagccagttttcccagcaccatttattaaatagggaatcctttccccattgttgtttttctcaggtttgtcaaagatcagatagttgtaggtatgcggcgttatttctgagggctctgttctgttccattgatctatatctctgtttaggtaccagtaccatgctgttttggttactgtagccttgtagtatagtttgaagtcaggtagtgtgattcctccagctttgttcttttggcttaggattgacttggcaatgcgggctcttttttggttccatatgaactttaaagtagttttttccaattctgtgaagaaaggcattggtagcttgatggggatggcattgaatctgtaaattaccttgggcagtatggccattttcacgatattgattcttcctacccatgagcatggaatgttcttccatttgtttgtatcctcttttatttccttgagcagtggtttgtagttctccttgaagaggtccttcacatcccttgtaagttggattcctaggtcttttattctctttgaagcaattgtgaatgggagttcactcttgatttggctctctgtttgtctgttgttggtgtataagaatgcttgtgatttttgtacattgattttgtatcctgagactttgctgaagttgcttatcagcttaaggatattttgggctgagacgatggggttttctagatatacaatcatgtcgtctccaaacagggacaatttgacttcctctgttcctaattgaataccgtttatttccttctcctgtctaattgccctggccagaacttccaacactatgttgaataggagtggtgagagagggcatccctgtcttgtgccagttttcaaagggaatgcttccagtttttgcccattcagtatgatattggctgtgggtttgtcatagatagctcttattattttgaaatacgtcccatcaatacctaatttattgagagtttttagcatgaagggttgttgaattttgtcaaaggcttttcctgcatctattgggataatcatgtggtttttgtctttggctctgtttatatgctggattacatttattgatttgcgtatattgaaccagccttgcatcccagggatgaagcccacttgatcatggtggataagctttttgatgtgctgctggattcggtttgccagtattttattgaggatttttgcatcgatgttcatcgaggatattggtctaaaattctcttttttggttgtgtctctgcccggctttggtatcagaatgatgctggcctcataaaatgagttagggaggattccctctttttctattgattggaatagtttcagaaggaatggtaccagttcctccttgtacctctggtagaattcggctgtgaatccatctggtccttgactctttttggttggtaaactattgattattgccacaatttcagctcctgttattggtctattcagagattcaacttcttcctggtttagtcttgggagagtgtatgtgtcgaggaatttatccatttcttctagattttctagtttatttgcgtagaggtgtttgtagtattctctgatggtagtttgtatttctgtgggatcggtggtgatatcccctttatcattttttattgtgtctatttggttcttctctctttttttctttattagtcttgctagcggtctatcaattttgttgatcctttcaaaaaaccagctcctggattcactgatcttttgaagggttttttgtgtctctatttccttcagttctgctctgatttttgttatttcttgccttctgctagcttttgaatgtgtttgctcttgcttttctagttcttttaattgtgatgttagggtgtcaattttggatctttcctgctttctcttgtgggcatttagtgctataaatttccctctacacactgctttgaatgcatcccagagattctggtatgttgtgtctttgttctcgttggtttcaaagaacatctttatttctgccttcatttcgttatgtacccagtagtcattcaggagcaggttgttcagtttccatgtagttgagtggttttgagtgggattcttaatcctgagttctagtttgattgcactgtggtctgagagatagtttgttataatttctgttcttttacatttgctgaggagagctttacttccaactatgtggtcaattttggaataggtgtggtgtggtgctgaaaaaaatgtatattctgttgatttggggtggtgagttctgtagatgtctattaggtccgcttggtgcagagctgagttcaattcctgggtatccttgttgactttctgtctcgttgatctgtctaatgttgacagtggggtgttaaagtctcccattattaatgtgtgggagtctaagtctctttgtaggtcactcaggacttgctttatgaatctgggtgctcctgtattgggtgcatatatatttaggatagttagctcttcttgttgaattgatccctttaccattatgtaatgaccttctttgtctcttttgatctttgttggcttaaagtctgttttatcagagactaggattgcaacccctgccttttttgttttccattggcttggtagatcttcctccatccttttattttgagcctatgtgtgtctctgcacgtgagatgggtttcctgaatacagcacactgatggatcttgactctttatccaatttgccagtctgtgtcttttaattggagcatttagtccatttacatttaaagttaatattgttatgtgtgaatttgattctgtcatcatgatgttagctggtgattttgctcgttagttgatgcagtttcttcctagtctcgatggtctttacattttggcatgattttgcagtggctggtactggttgttcctttccatgtttagcgcttccttcaggagctcttttagggcaggcctggtggtgacaaaatctgtcagcatttgcttgtctgtaaagtattttatttctccttcacttatgaagctcagtttggcctgatatgaaattctgggttgaaaattcttttctttaagaatgttgaatattagcccccactctcttctggcttgtagggtttctgccgagagatccgctgttagtctgatgggcttccctttgagggtaacccgacctttctctctggctgcccttaacattttttccttcatttcaactttggtgaatctgacaattatgtgtcttggagttgctcttctcgaggagtatctttgtggcgttctctgtatttcctgaatctgaacgttggcctgccttgctagattggggaagttctcctggataatatcctgcagagtgttttccaacttggttccattctcctcatcactttcaggtacaccaatcagacctagatttggtcttttcatatagtcccatatttcttggaggctttgctcatttctttttattcttttttctctaaacttcccttctcgcttcatttcattcatttcatcttccatcactgataccctttcttccagttgatcgcatcggctcctgaggcttctgcattcctcacatagttctcgagccttggttttcagctccatcagctcctttaagcacttctctgtattggttattctagttatacattcttctaaatttttttcaaagtttttaacttctttgcctttggtttgaatgtcctcccgtagctcagagtaatttgatcatctgaagccttcttctctcagctcgtcaaagtcattctccatccagctttgttctgttgctggtgaggaactgtgttcctttggaggaggagagatgctctgcgttttagagtttccagtttttctgttctgttttttccccatctttgtggttttatctacttttggtctttgatgatagtgatgtacagatgggttttcagtgtggatgtcctttctgtttgttagttttccttctaacagacaggaccctcagctgcaggtctgttggaataccctgctgtgtgaggtggcagtgtgcccctgctgggggatgcctcccagttagacttctcgggggtcaggggtcagggacccacttgaggaggcagtctgcccattctcagatctccagctgcgtgctgggagaaccactgctctcttcaaagctgtcagacaggggcatttaagtctgcagaggttactgctgtctttttgtttgtctgtgccctgcccccagaggtggggcctacagtggcaggcaggcctccttgagctgtggtgggctccacccagttcgagtttccaggctgctttgtttacctaagcaagcctgggcaatggcgggcgcccctcccccagccctcctggggccttgcagtttgatctcagactgctgtgctagcaatcagcgagattccgtgggcgtaggaccctccgagccaggtgtgggatatagtctcgtggtgcgctgctttttaagccggtctgaaaagtgcaatattcgggtgggagtgacccgattttccaggtgcgtctgtcacccgtttctttgactcggaaagggaactccctgaccccttgtgcttcccaggtgaggcaatgcctcgccctgcttcggctcgcgcacggtgcgcgcacccactggcctgcgcccactgtctggcactccctagtgagatgcacccggtacctcagatggaaatgcagaaatcacccatcttctgcgtcgctcacgctgggagctgtagaccggagctgttcctattcagccatcttggctcctccccatgatttttctttataataacaattaacctaacataaacgaagactggaactcctatctcctgtttccatgttcagtgcttgtttcaagtattccagtaagaaaaagtaaatttggaattgatatggtaaaaaattgttttaatttggccataaagttaatggtgtgttttgtcacaagcaactcccttaaagaatgtttctgaagccccttccttagtctatcaggccaacatattcctgtaaaacaattaattttatcaatattttatatagaaaataaggtgatttttaaatgggaaaacagatttccacaaggattacatttttaaagtacataaaatattaactagattttatgattatgtattaattgttaacatggtaaatatgtttttaaagaatgaccaaaaccattttttgtagaagaatttatttgctttagaatacccataaattaccatttttataccacatagagtaaggatttacagatcttagccctgtgaggttatcagaaaagcaataagtatattttttatatttttgatgtgctgtttcagaaattatcacccttaacataaattatgaaatgcattgaatacaaatggaaaaatggcatttaataagaattatttgacagtaaatcacctgatataattctaaattgactacataaaagtagagttatattgtaagaagttcaattttataagtagggcatgatgtccagataatgtacaaatgtgatattactaaggtattcaataaatagtattataatagaataaaacaaagtaaatatgaatagtaaaaatgagtatctgaaatcctaagattgaaaatttttccaattaatattatcaattagctaataacttatatttcaagcacttctcttactttagcttcctttgttagggaactttctaaaacgataatgccttgaacataatatatgaaaagggcaatttttgggcctctcatttgcacaggccccttataagactaatccttttctgcgtattgtgggtcaaaattatgaacagaatttatgccatccatatttaagccttcagaacttactaagtggaatcataaggaactatttaatggcctcatccaattgtttcctttgaatgactatatcttctgtttatgttttcttctatcattgattgctttttgttactatgaatgtgatttccagagccaacacctcatagtttctgacttgctttgtactctgctctaggccttatatccaatactttgtgcaaaaattttctgacctctctttgcaatttaaagaacatcagtgtttatctctaaattattagctatgttcttaaagacaatattgcctaatagcaatgtcgttatagaatagttccaggagaggcttttatcatgcacgccaaacagctgtttaggcacaatgttgagtaggcttgtgtggctttatattagcttcgtaggaaagaattttgtgatcagttagtaatgtctgcaacagatgcacaataaggaaattgaagcacatatgccatgtgttaagcatcattatattaaactgtggttcccaaacttgaatattcgtaacgcagggaacttacaaaaatacatatccctcctccctactcattgatctacaagattctgagtccacaggtctgggctgatatcataaaaaacaccagtggtaattgtaatcaaggatgggattatattttgagaaatactaatgtagaatatactaaaaagtctcttgtgagttactaagtccaaatgtaagagtaaaatactaacatgtttcagttttatgacacaaattagaataggatcaaattcaccaaaagattattccacacctgtttgttaacttgggggtcattcacctgagaatactcagagaaagaaaagtgctcatctttatttctttgccccatgtaattttcctgcaaaggccatgggaaattacagtaagtggcacatgcagtctcctagtagagggagaagaattctgcccctcatcatctgtgggagaactgaaattgtatgctgctattacctggggagtagtacccatggaaagtactaattatagttctttgtgattaaatttgttgttaaaagaatttttttctaaaaacaagtataaggaaatacatatgtatatatatatatacacacacacacacacacacacacaaacatatgatagagttctgaatctagattttcatggttatgtttctaattgttttgtttctttaaaaatgtttttaggggccagggacagaggctcatgcatgtaatcctagcactttgggaggccaaggcgggaggatcacctgagcctgggagttcaagaccagcctgaccaacatagagaaaccccgtctctactaaaaatacaaaagcagctgggtgtggtggcacatgcctgtaatcccagctactcaggaggctgaggcaagagaatcacctgaacccatgaggcacaggttgcagtaagcagaggtagcaccattgcactccagcctgggcaacgagagtgaaactttgtcccccacccccccaaaaaaagaaaaagaaaaatgtttttagggtattttttatttgaaaatgttcttttcctctcaaaagtccttgtcagattctggtaacaggaaatatgaataagtgacttaataaacaattgtaactaacatctgttttaattataaatgagcataggaagaggaattataagccaaaacacatccaaaatatgaagctggcaaattaagtaaaaggctatttgtacactgacactagcacattgctagtgttataataagggacatggaatatccaaaggctgtttgaagcatgctataaatctattcactattataatctatctttacttacaaataaaaaaatggagagacatgtaacatatatattaatatgtgtagcaatggcagaattttcattaagctgttgaaggttaatctttggggtgttccatttgcacaggcctcttacaagactaattttttactggtaattttattttttgtaaatagcacccaccttcagttgtatgatattctgacctcaaaaatgctggatttgattctctcagcctgtgatagtattttgaaaatgagaagaggccttggagatcatgtaatttggcatctctattttaaagctgaaaaatattaaagtccttttcaatttggtaaataattataaacaaagaagctgatacaaacagcctacacgaacagaaatatagaatctacttaagagaaatttaaggacactgtactctgttctgtaagaccaaatcgggaaagatactttcacttctgtatataacactacatacaatggaagttaagaagaggcaatcaagcttatatgaggtaagaaaacctgccacttaaagcatagctgaaaaaacttttgatatttaaatttaaaaaggaagatagaagtaatccctgcccccatgctagcattttggtcttttggtctctcttactctgcagctattatcaccttcttctagtattctgcaccttttaatgtaagtatcatggtaataagaatttttatctgttttgtttactaatatatctctggagacaaaaagtacccagtacatagtaggtactcaaaaatatttatgttataaatgaatgtctattttatgtccagagttttgtacacacataatataaagaatgaaaaaaataaaatattcgaagaaacgacagctgagaaattccagtaattgaataaaggttggaatctaggaaacaatgactctcaaggaagataaataaaaagaaatccatgcctagtctcgtagtagagaaacagcagataatcaaagaccaaaaaaaaaaatcccaaatgaaggaaaagagcagattatctcctaaaatgactattacactgacaactctttatttaccagcaatactgtaaacaaaaagcaagtagaataatatctttaagatgccaaaaataaaataaatttcaatgtaaaattctatatctaactaaactatatttcaggtaagggaacctcaattaaaaataagagttttattatcaaggactccactaaagatacttccaaaatacgtacttcgggagaaaaaaataataatctcaaaataaaaggtcaaaatgtaagaagtagtggtaagccaaacaaatggcaatcataagggtgaatctaaacaaactacctttatgcaaaaaaatcataatattgtcaatttatgagcctaaaaagaaaactaaaatactgaacatcgatagcatatttaagtcaggacaacaactatctaaatgaacatgtgccaagatccttttatgttgagaagaaagattaaaagaatcatcttaattaaaatagcattgtatacaaaattgagctttaaatacgactccaaaataaataccaatagggatctttttttaaagttagtaagccaattctaaaatcttaatagaagagcaatggtgcattaagagtcaagataattctgaagatgacaaaaatgaaaggtatttaccttacctaatataagtgcagagcatacatttatattcattaagaaagggtgttcatggtgcagagatagacaaacaaaccagtggaacagaatatacagcccaggacttaacatccccctgcaaatatgtggaaacttattagagagacagaattatagatctgtgaagaaagagtaagttagtcaataaatgaaactggaataaagtaggtccttctttcacacatacacaaaaaaatcaattccatgtggactaatggtttaaatgtaagagactaaactttaaaatatttccagtaaagttatagcacaatataatgttataaaaggattcttaagacataaaacatataaattataggaaaagacagattgccaacttctaaaactattataaaataaaatgggaaaataatccaaatacaagaagatatttgcaacacataaaactcacaaaaattaggtgccaaattatataaggaatgtctactaatcaacagaaaaaaaaagcacaatagaaaaaaatgtgttcattctttgtttataaaaaagatattttaccaagggaaaataatagtggccaatgaacacaggaaaagatccttagcctcccttgtagacaaggaaatgtaaattaaacctccagtgaaatagtattttatatccaagggattggtaacaaatttaaaaataaatatgacaatggcaaaagttgatgaggatgtggagcagacagctacatactactctagaaatcaatttgatgttacacagcaaagtttaaaatgtgtatgcctatgacccctggcattgttattaagaaaaccttgcacatgtgctcttataagcatatatttatagtaccatggtttataaaagaaaaaaaaaaacagtaaaatccgtatatattccaaagtctacttataggataatgggttagttatagatactcatagactgaaatactattcagcaatgaaaatgagttaactatgtccagtccatgaacaggaataaatctaaaaaatataatgttaattttttaaaaagtgagtcacaagataacgatgacagtatggtatgtaaaataaataaaactaaaccatagattgcttaaggataaatatgcaggtagtaaaaacataaggaaagtcacagagatagtaaaaagaaatatttagaactgtggctaactctgtgtggaaaaggaaggttgtggtaggtggagcacataaaaatatttgaaagtattggtaatggtctattttttaacctgagtggtagcatatgtgtgtctatttattaatcttcttcaaaagctatgcatttcatattaactcacttgtttaatataaaatattttataatttcttaagtaaaaatgtcagctatgataaaattcattacatctccccctccttccaaattatcccaacagttaaatgttgattcatttgtagagcattaaaaacacatttgattgaataaaattcaattaacatatatgtaggagttcagtcagggtggcgggaaaagttgtaagaaaaagttatagggaaagactcaaaccttcttggaaggccaggaggttttgcaaaagcttcgaaggagaaatggctgaaggcagccaaattctgttatccagaacctgaaggcaaagggtagataacaagggaatgtaaaggaacttatctagataagttggtttacttatgtctccagaaaccaacctttgatcattcctgcacaggactgctctctactcagggggttggcaaagttaattacccacaaattgtgtttgctccaatcctttgtcattaaatctgtactaaataaatgcaagtgtcacaggcttatgggggctgcactctgggttgcactgcactttcattggcagtgctaaggggtgcagtccatctagccatgctgtcaggcaaaatacctgtgtcagagtacttttgtcatccatcactcagccagagtctgcgggacagacttggcacatatacttaaaatacctactaaaaacaatgtgttaaacctttttaggcccaaaagataaaagatataatatctttttaacattttaagttttgttcttgagttagttcatatattaagaagacgtgtctggggaggcagagcaggatggcaaaatagaaggctccaccaatcatcccccctgaaaggaccccaatttaacaactacctacaccaaaaagcaccttcataaggaccaaaaatcagatgaccactcacagtatctggttttaattccacattgctgaaagaagcactgaagaggcaggagaaactgtctttaattgccagcgccaccccttccccatcctccagcaacaattccgtgtgctggggagagggagagcatagcatttgtgaggaaatgaactcagtgctgcccttgttatagcagaaagtaaaaacaaaccaaattcagctgacacctgcccacggaaggagcatttaaaccagccctggccagaggggaatcgccaatcccagcagtcagaacttgagatcccacaagccttaccactgcaggctaaactgctctgaggctgagaataaacttgaaaggcaggtcactgcctttctaggtcactaggactgcaactcctaggaaagtcctagtcctgaactgggcccagagtcaatggacttttggggcatgtgacctactgagataccagccagggcagctaagggggtgctggcatcacccctcctctacccccatggtgcatagctcatggctccaaaagagacctcttccatccacatgaggagaggaaaggaaagagtgaaaagaactttgtcttgcattttggatatcagctcaaccacagtaggctagggcaccagtcagagttgtgaggcctcccttccaggccccagttcccagatgatatttctagacacaccctgggacagaagggaacccatggccttaaacagaaagacccagtcatatcaggattcatcacctgctaactgaagagtccttggtccctgaataaccagcagcatacccaggtactatgctgagggccttgggtgaaactctgagacttgctggcctcaggtgagactcagcacattcccagttgtggtgactatggggcgagacaaaaaagcagagggaaagtaaaggggactttgtcttgtaccttaggtaccagcttggccacagtgtgggtagagtgccaagcaggctcttgagttaccaatttcaagatttggctcttggaccgcctttctgggccactcaacttggaaaagaagaagtcaagtaactcttgtttgcagatgatatgatgttatgcttgcaaaagcaaagactccatcaaaaaactattcaaattgataaattcagtaaagttgcaggattcaaaatcaacatacaaaaatcagtagcatttctatatgacagcagtgaacaatctgaagaagaaatcaaaagtgtaatcccatttataatatctacaaataaaataaaatacctaagaagtaacttaagcaaacaagtgaaagatctctacaataaaaactataaaacactgataaaaaaattgaataggaaacaaaaaattgaaagatattacatattcattgattggaaaaaccaatattgttaaaatgtccatactacccaaagcaatctacagattcaatgcagtccctatcaaaatacgaatggtgttcttcacagatagaaaacacaatcctgaagtttatatggaaccacaaaagacccagaacagccaaagctatcctaagcaaaaagaacaaaattggaggaaatcacattacctgacttcaaattatactacagaactatagtaaccaaacagcatgatactggcataaaaacagacacatagatcaatagaacagaagatagaacccagaaacaaatccacacacctacagtgaactcattttcaacaaaggtgccaagaacatacactggggaaaagacagtcccttcaataaatggtgtggaaaaactggatatccacatgcagaagaataaaactagatccctatctctcaccatatacaaagatccaatcaagatgaattaaagacataaatataaggcttcaaattatcaatcttctttaagaaatcactggggaaattttctaggacagtggtcagggcaaaaatttattgagtaatacctcccaaacacaagcaaccaaagtaaaaatggacaaatgggatcatatcaagctaaaaacttctgcacagcaaagaaaacaatcaacaaagtgaagagacaacctacagaatgagagaaaatatttgcaaactactcatctgacaaggaattaataaccagaatatataaggagctcaaacaactctataggaaaaaaatctaataatccgattaaaaatgggcaaaagatttaaatagacatctctcagaagaagatatgcaaataacaaacaggcatatgaaaaagtgctcaacatcactgatcatcagagaaatgcaaatcaaaactacaatgagatatcatctcaccccggttaaaagagcttatatccaaaaacaggcaacaacaaatgctggtgaagatgtggagaaaagggaacacttgcacattcctggaagtgtaaattatcataataactaggagaacagttctgtggttcctcaaaaaactaaaaatagagctaccatatgatctggcaatcccactgctgggtatataaacaaaagaaaggaaatcagtatatcgaagagatatctgcactgccgtgtttgttgcagcactgttgacgatagccaagatttggaagcaacctaagcatccatcaacagatgaatggataaagaaaatgtggtacatttaaaaatgttaagtgaaataagcgaggcacagaaagacaaacactgcatgttctcatttacaagtgggagatgaacaatgagaacacatggacacagggaggggaataatacacactggggcctgtcaggggagctgggtgggtggagggagagcattaggaaaactagctaatgcatgctgggcttaatacctaggtaatgggtggataggtgcagcaaaccaccacggtacacgtttacctgtgtaacaaacctgcatatcctgcacatgtaccctggaacttaaaattaaaattaatttaaaaaatcaaaacaattgaactcatcgagatagacagtagaaggatggttaccagaggctggaaaggatagcagaggaggtggtgggtggggatggttaacggctaaaataaaaagttagaaagaattaataagatctagtatttggtagcacaacagggtgactacagtaaataataatttaattgtacattttaaaataactaaaagagtataattgaattgtttgtaacacaaaggataaatacttgagggagtggatattccatcttccatgatgtgattattatgcattgcatgcctgtatcaaaacatctcatgtgccccataaatatacacagctattatgtacccagaaaaattaaaaattaaaaaaagtcatgcatagctcatattccaagagcttttagaaatcattgttttgagaatgcttttatataaatgaggatatattgactaaaaataacataactccttataatgtactatataggtatacattataatatggcatatctccagctctattttaatgtctctatttaatagatttaggtataattttattgtattttcagtaactcatttctaataacagaattttttaaatcagtaatgtcttatacattaagaggttaattatttgatattcagtgttcaaaatttgtttgctttaagactgatttaaaactttaaccaacatgtttgaaatcattgagaccacagcccacgatcagaagacatactttagaaaatgattcctatttgtcctccaagaaatttacaaatatgtccccatacaagagctccataaaggacttcatatccaaatatcaagggctttgaacaggatactgccacattacccgagccctaaagcattgtttacaaggaattttgacacccaagttaaaaaatgacacacgagcaacttttcccaagaaactattctaaaaaatgttaaattgtatttggtaattcagttgtagaaatctgttttaatttttcttaatagaaacataacaaagatcataaaaacactcattttaatttacaggtggcaaatattcattttagtcaccaattattcaaccacaatgaacttctggaaaagcaaagagtactaagttaacaaattgagtctattttcatcaaattatctaaaatcagccaaaacttaaagacaatttcatattcatgcccaaaggccaaacacaagtttataattcattgggaataaaagaagtcctgttttttaaaatccctcctgatttttaagaaatctgaaggaattcagtttttataaagccagctagtttcaaatagcattaatgttgatgtggtaaattatagacgtcatttaataaaatgtatatttagaagacaaaacagcactatagacagaaagactttttaaaatgtgtgtcaaacagaagattagaaaaaagtttttagtaagaataatcagaagtaaaaacagtgtaactatttttaactgaagtattttaagtcctttcttccaacaaaaattgagtgcctaatacagccatttccagaactttttcttttaatatgtagagagaatatatgtatgaagccatatatatatattcatatatgtaaaaccagatacaaatattaatcctcaagtgtgtatattacattatagacatttgataaaaaattataatgtagatattagaaacaacgcaaatggctaatcataatatggtatggatgcactatattagtaattagatttagtctaattacacattaaaaccccattattataggctcaattttatttttgaagtgttttattaaagcagaggttttacctttagtaggatgaagacataaaactttcataagtgactaagtgtagagggatatttaacaggacccatgacacatccatatactaatcactaatcgcacactattcatatctatttaatactgcagaacctctggaatctttttgtttgtttgtctgtttgtttagagacagggtctcactctgttgcctacctaggctgcagtgcagcagcacgatcactgctcactgcagctttgacactgggggctcaagctatcctcccagctagtttctttgttgctgagactacagggactttcaccgtgcccggctaaattttttatttttgttttttgtagagacaagggtcttgctctcttgcctaggctggtctcaaactcctgggctcaagtgatccttccacttcagccttccaaagtgttgggggttacaggcatgagctaccacatctggtcttgatctttacttgttaattatttgctgcttaagagagaatcacttttacttattcaagtgatttcaatgtatttcttcagatattttatataaccattattaatgaggttttaattattgcacttgttaataatatgcagaaaataagagaaggaattagagctattattcccataaatggagtgaataagaaaaataattttagaaaaacttgatcaattgtaaaatgaaattcacatccatgctctctgaatatatgttaaaataaaccaattagtatttgtggaggaacatgaatctgataaaaatttccatgccaaatgaatatttctcattatatcaaagtataaatcttcagtcttagaactgaaagactttatttattatctagctatgaatatatcttcattttgaaacatctacaacaaaaacaagaaagaagagtactcaatgttatcagtttggtagaactgaattaaggcagaccttttgatatcaggttgactctttcatatttgttactgtattatccacataaggtcttactaggagacaaagttactctgccataatgccaacttgtaaatatttgacattgagtctcatagaaactctctaaggacagtgaacaaataccataagcagtactgcatttgagacaaaagggaattaattgagagtgacacccatagataccactggctgctaagaaggatacgatcagtgccaggaaacagcactgcaccttttatcatttctcccatgatgcaccctactgaccacatgtcaactgaaaacaaaaatgaaatgaagataaacaagaacacaggaatagaacaacaaataaatgaaaacactgggctactcatgccatagagcaatagtctgacttttcactgactggatgagaggccagtggcatgatcattagcattttaaatggtggaaaggggagaacataggctctcaaggcccttttctgtcatataacagaaataacaacactacccaatgctacctaatgtagaataatattactttgcaattataactcaatgattaatttaggttttgatttaaaaggtctaatttgcattcatttactagaatcctactgatttttatcataaattattctagatagtgttaatatgcaaatcagtttcttttttactcttgtatacgtatttgaaaaaagaaaaaagaaaagctgagctgccagcaacctcaaaagagtttcttttataaaacacatttacccttatttataaatataaatacagttccagaagtgaaaagccagttcaagaatgaatgtttcagaatatgttgtcttagtgtcattgactctcatcaaaggagcatgtttctcagcaggaagccttgtcttattcttataaacacagttgccttataatgataagaaaagctggctttcaaaatgggatcgctcaatgtgaaataaacaacatgactaaagagctgatacttcttctgaaactgtgaatcaaaagaaacctggaattcaaggtggaattataatggtctctctgttattgccaagtatcatccagaacttaaaaccaggaagccagggcagagcgcacagagggaggggcaaaatggggaagggtgaagcaagaaagtgaaatctctctcttgagctacacttggttactcacttgttgtacttaaaaatcagaaagagagggcattcttgtggggggaaaaataaacagaagaattagggatgctgggggggagcaaatagggaaaggcattaagatagcagcacaatataattttgctccacttacttttcaaattacatcttgtaatttggcagtgaccttaaagagatcctcatgagattcattccaatgtgaaaatctcactcgggttaaactcaaagtttccattgtttgatttaacacctaaacaaagtgatcactgcaaagaaacggttacggctttgaaggtgataagcatacccaaagaagcaaatttgttttgcttccagtttaggaaagcaactgacatgcagaaatatcagggaaagatagagcaaacagttgtgcatccctttattattaacgtgtttgtaatttcaagtaatatctgtctcacaacaggatggtattgagaaatctttgattaaagaaaaaaacggaaaacatatttatttttaaattccaagtattcctatcatactgtccaaagagaccagtttgactaaattgctatttatggattatctatattttatagatattgtggaagagatatacaaaaaacattgagaccaaaaatctcaatatgcagtgttttctcttgcctgtctccattcaaatgtttagaaaaaaaatggtttctgccattaacctgtctgggacttaggaaacatctatttctatttctcatttagtataaaattgttttttacaatatctctggcaatatattcatctttttctgctagagaaccaattctattactttccaactatgtgaccttggccaggttacttctctctaaacctcaattttatcccctaaaatattgatgataagctgtatttattatgtagagttttataaaagacttgaaaaagttatgtctgataaagatccttgcacaactgcctggtacatagcaagtccccaataaatattatttacatatcaaatcatcatgtattaaataatatattaaaattatatttgggaattaaatatctttggaaaaggtttatttattttaaatttacataattatattatatatttacatctataataaagaaatctttccagtggaggaatctcaccactcactaggcaatctattttattgttgaaaccacttagaaaggcatcctacatattgactcacattgactctatggaacttctcttcactatgtaaacaggaactactgtgtttcctcatccaaataagaaccttaaagtatgtaactataacctgtaatccctaaccattcctctcctaaaactggccaattttatctttcaggctaaaatcccttgatttttttttttttttttttttttttttttgctgttcttcacatgcctttaaacaacagcaacaacaataacaacagatggcctaaattaaattctggtctctatgttgctttagcaccagttggttctatacagttgttaatttttttttttctttgagccagtgtctagctctgtcactagactggattgcagtggcacgatcttggctcactgcaacctctgccccctgggttcaagtgattctcttgcatcagcctccctagtagctgagattacaggcacacgccaccacgcccagctaatttttgtatttttagtagaggtggggtttcaccatgttggccaggatggtcttgatctcctgaccttgtgatctgcccacctcggcctcccaaagtgctgggattacaggcatgagacaccatgcctggcccagttgttgatttaataactggtattaataactggtatatctcacagttctctttttggtgtgggggatctgggagatactccaatgtaaaagaagaatatttatttaaaatatatatcttcatgggcagaactcaaaatagatttaatagatcacaaatcttttgcataaaaataatgcagagatgtaggctctagatctgaaattctgatgtacatattgaatttcattttctttattttaatatatctttatgggtgataatatcctggaaatctttctaattcccattttaactttactcaccattcactattcctagagaatatttatatctatgctaccaaaatgctaagccttgtgcctagaaatgataagctctgttatcttgaattacaaaaattgaatatatgcacataaatttatatagatttttatgtattcaagacaggattatggctcaagataaactcattgtaccaaacttcatgaatttgccatctccactaacagaaaatgtataataaaagaatttgataccaactcttattgaacaggaaggtagtagtagtaagccttccctctactaatatctctatattaggatacataaacatactaatacaatatgtatctgaatatattagtgatatatatatatatatattgctaatgaagttaagaatagattattttatgaaattgtcaggtattacaatgaatagggactgtgcatagaccttagaagtaattagcaaattcaatcactgttggaaactgcattttatgctttctgaaacaatctgatacagcatctgggtctctgtaagagttctgtacactaatgctgccaaggtagaattctgttggcttttaaaattctgattcatcacattctttcatcatcattctatcattcccataggcagaaggcagattcacttgcaactgtaacaatcagatgctgagtcactttccttagaagaaatgttgagtaaattttggtgttaccaaaatatgattaattttcagagtgagaacctctgaaaatctcatgtcacattatttgtcagaaattagcttataataaattatctttcttctacttctaaccaagagatagaaattatacaatgtaagccctggaagttaaatctaaataaataaagaactatattgctacttccacactccatctaatagcttaaattatgatccacaattaaataattttgagactatgtgagcttctatcctggaaaatgtttcctctctgggggattacgtaactcttttatcacaatttctgagacttctccttaacacacctaagtatattttcatttagtgtagaatttagacaaattttctctcaatgaatgactcaacacacaatagcaagaagatttaatatagttttctaaaatcagaacatttctttgaaaattatttgttataatttttataaaaattataagttataaagttagcagttataaaattagaacatttcttttaaaattagttaactaagtcataaatttagttgtttaacaaaaggaccttgtactaaacttcagttcaaagacagaattctaaaagaccactgatatacataaataaactaagaatgtacatattttgcacatgtgaatctaagtaagaaaaataagcaacaattcgcagaacttaatgctaaatattgtaatgccaggaaatcagaaaaagactttctccttgaatctacctattaaacttgcttttatttctttacaacctcagaatctccagctcccattctggtgaaccctgcctcacattttcataaaataataacaaaagagaagagttagcaggcacactagtggtaaaaatgtattcttttaaacaaattcaaataataattttatttttaaatatttatttataattacatgcaatttgcttatagatttgaaagaatgcctactaaattgtttcatcctaactttatttaaaaccataaattttatattgtttgaaataactctgtattgtcttaattctaagaaaaagagttagactatatagtaagttgttagttgcaaaagtttattaggaattaagcactattatttcaaagaggtaagaagaattttaaaatatctctgtgctagattgatataacaatctgtaaccacaaatttttgttcattttactttgatccttcctaatgttcatattcaaactttaaaaagatacagcattcagttaatttgagggtgtttttcttatttcttcaaatatacttttggaaaaccatttacctattccttaataacttggctccttggcaaggttatatgtatatctctttcattctaactgcaatttcctgttcttcagagggaaaggcaagaggagctattttagcagtccagctgttagctttggatataatatacttgaggtccagaattttcaaatgcatgcagtatgcctgtctttaactttatatccagagaatattggccaagaacttagataaagggacatcacagggtttgctcaaagaaggtgctatcatttgaagtagaatggaaaaaataaggttgaagaatgtatctaaaagaagcaggtttgaggaaaggactcatgaaaattatactgggactataggagtctttgataatcaacaagatggcatgtcctggttggggtttggggtggtggaggcagtgaatgactggatagttcttagaaaaaacttctaaggaagcattgtaaagctgctttcctgtaaattttattgaaaggaacaaaatctgagtgaagctaaagtcactgatttcttttatctgttctttggactacataaaaaaaaataatggacttggcctatttactactctctaacttgaaagtcagcatgcgtttaagaatgtttaaagaatgtttagtaacatatttaaatatgaatgtgcattataatgttcaaataaactacattatgtaaaaatatatgctatgaaatgttttaatcataaaactatagtgaaaattaagtgtatgatagtgtatgcataattaagaaacactttacacaagaaaaataagtattaagaagtgatcctctggatattaaagtaattagcaaattaataagtggaaaagcaaatatgtattgtttattttgttcaattttattttgccaacattctaattcagtaaccaagacaattccctgtgatatcatctagatcatatcaaccaccaagaaacccccacgatgtttctcaaaatgcaaagatagtttgaatgtgggaaagtagttaaacttcagtcatcaatgacaatttcataagattctctgatttgtcaagacattttactatttttgcttagggttcaagtttaaaagttctgtgaagagagaagaaaaatgttgattattatgatagtattatcacatcatttttcagcctcaaagtaatttaatataaattactctgaataattctaggtgaaagacatgagaacctctgattgttttttgaaatttctgcagagtcctggaagtagtcaaggtatcaattagcatatacttagctttgatatttcttccaataaatgttagactaatttcaatatgcttaaaattgtgtaattcttctgccgataaataacttgaatcagccctcagccttgtgtctgatagtcatagtttgagaggttatctgactgctcagttgttggtaggaagtcctgtgcataaaatgataataatttcatttaaagattaataaaacaattctactcaaaattaacaaagcacattgtttaactgagatttctataggtttattttttaaatgtaactataactttaaacattaagttataattttaattataggtaaaaggggctaagaaatccaaatggaaacattttcaaaaaggaaacattttttctaacctatttcattggaaaatatctactcattttttggtaaaatttaacttaagtaaaaggctttccattgtaggtgtctttatgcaattttttttaacttttaggtccacatgcagggtcattatcacatatggcactaggctatcaaagactgctgtactatgtaatcatcacttgagataaagaaatatatatatttatataataaatgcaaacctttattataatctacattatctgtattagagattatttaaatgtctaggttcatacatatcaaggatataaatgttatgtattaattttcacacaatttaatttcagctccaaaaatttttctaaaacaaactaggattaaaaaaggtgggaggggcacctccaagagaaaaatttttaaaagaaaataaaattatcaatatggtgctttgtttttttgtttgtttttctgaagggttagattgagtttaaaactttttgctttttttctcttttattggcttttaaatttaatattgtcaaaatagaagaaaagcaatccgcataaatgcctgaagagctaaataagatctcagagaacaacctcgctacatgaaatcaagtgacatgtaacaaaatgtcacatggaaatgagaaatcctgtggctttttgctttccactgacaagtgcatgagagagatgtggctgtgcaacttcactctgagtattgattgagaggttccttttttgtctaaaatgtgttatataccaaaggcaaaagcataaagaaaataattcctacttttgaataaagtcagcacatttaaatatgaatgtgcactataatattgttcaaataaactatattaggtatataattaatccccaaactatagataagtaaagtgaaataaattttcctaagtagccatatgaaatctaatggtgaaaatgatacttcacactatagataggaaaggaacatggagcaaacagagattcaagaccttaagattggttataaataaatggttgccatgtggttttcttatcttctagaccagcactgtccaatagaaaaatgacagtcacaaatgccaatcatatacgtagttttaagtttaatgtccacattcaaaagaataaaaaaagatatatatatttaacccaatatattcataatgctatcaccttaacacaagctatataagattattagtaatatattttacatgcttttaaaaatatcttcaaaatctggtatgcattttacacataaaacacatttcaatttagactataatttcaagtgctgaataaccacatgtggctagtggctacctactagacagtgcagttctagaatatgtcatcactcttacattactagtggattttagagactatctcattaatatccagcagaatgaatacatacctacctaaatacaagcttattatggtacccacttcttgttgagtcaggtttttttgtttttgttttttactattggactttttaaacacctcaataaaaatcataacctttcttacataatagaaggattccttaataaaactttcttatcaatcaaatagaatggttaatagagttatgggtcacatggttattgccaatttccaaaacatccatatgtaataaatatactaaattcaatcctgtattataattgttaaagttgtcaatggtgattgtacttagatttgcactagtatttgtagtaaggtatttttgtatttttaaaagtatattatactattatatgtaaactttattgtctatatattacaaacacaaatctgtacctttactagagagtgaatttttggccatttaagaaatgtatcagttcatttgataattccaaatcatagatagctctacaagaaatttctgatggactctattgcaggactcagtagtagaacttaaatccaaattgctttatgaaattataaatttagttgggaaaacaagcatgtatgtctatgtcacatctccaagtcaggtgagagaagtctacattaaactcacctgaccactagcaacttgaacaataattacaatttttaaatgcagaagttcatgttttgaggaagatatgctatattgacctgttaaagacttgatttagtgtcgagtaatttaaatcaacaaagccatagacagaagcttagaatgtcagcaaggagagcaattattatgcctaaatattgtagaagcacaaaatagttttagaaaggagatggaaaatgacttgcaaatagtgacttattttgctagttataaaggtaaatatattttaatcatttgggatctggtagcctttgttattaaagaaaaatagcatttctatttttagttgcaggcaagaaagtaattttagaagaaaaaagcccattgaaatttaattaaaagaaatcattgtggtaggcagtcttcagtactggtcagattatagaaattatcacttttttattacaataacaccacttacccaactttttgcttctatctttactctcctggtaaaatcattatgtgtttaaaagggagagagaacaaaacaggtaaagctgtagcaaaaggtacaaggatacagtcccttcctggaaagaggattttgtggcgaaccatttctcccataatgcatcccacagaccatatatccactagaacaggagagagagggtagtgaagaaaagggaggaaagtaaagttaactaagataattgacttctgaaggaggaggaaaaagaacagtttgattaaaagtacaattttcacctcccaccaaaagttggccaaaatgtgaattcaaaccagcgctatgctattacataaacagtgtttagtatgagaactcaaattaatgtttaaaaacccattactttgtgggtgccttacattgcctctcagcagtgccacaaagtggtgacattggtgactgagaaaagcaatagctaaaccaaaagtatctccatggcaggtgacagctaaaagccaccaaagggttttctgtgtcattttccggatgcatagaaaacaatattaacttgtagagttggctattttcattttctattctattcagttacagagaatagggcaacaagagaccaccttttttttcagggggccagggggccggggcaaaacaagataaattcaaccaaatccaataaaccaggaaatgactggaaccatggtttagaggcaaaagaattggaattcctggtatttgggacttagcttttccttcagaagtttattcttgtaaataaacatcagttttagtttccatttgaaatatttcaagaaaaaagacatatgatgaattagcacatgtataaaggagtcatctggaaggaaagtgaaaaaagtattaaaggtgttaaaaattgttatgtacatatatttatttccaaattgtcaaacttgttaggaaaacatgctttgccttctcttaccaatctttacccctttccaacttgcttttcattatggacaaagggaacttttgggcagaatcatttggccgaattgttccatggggaaggaaggcggggctaggtgcaggggacagcagggcatgcctgatgtgggagcaagcaggtttttctgcatgataaccttcctcccattggtgggagggcagcaccagggtgctaggcaggcctcctccatggacttagagaagtcaaaaacctaaggcagcaacttgcaattccttctagtgagggaagggaaagggattttaataccagctattggtagtgccaagatctgaaagcccaaataggcaaattcagaccgccccaccccccagtctcctgtacattcttgattcttgactttgtttctcctttgactttttaaaaataactcgtgaagaaagtataaaaatgtcttcttttctgaataaattagatgtggtattgcctagcaaggagggctagattcatctcttctgagtcaaaaggtaccagaactccgatattgcccaccagggtgaacctgacctttgtaagaggtgactttttaacttcctctgtataaatgcatacatacattatctgtcttctaatctaagagtatacaaagaagtttctgtaaacttcagtggccagggaattttcacaaaagtaccctgtagcacctgtacataaaaatacactgattatttttataaaacttattaatacagactgctaaaaactaaatagaatagaatataaaaataaatattaaagatacactgaatacatatacaatcctaatttaaaactattttaattcctaagtatattgaatatgttttcaatatggtgcattacttgtaagatatagtctcatcaaaataatacattgcaatgctttctaacatatttaataaatccttagttttaatcaactacactcaattgtgatacatttttaagattccttccatagccttcattttaaagtgttcatgaacattaagttttctttatgaaagcagtagtgtcaaatttgacattttccttttttacgatttttggaatatataaggatttattaggcaattgctactctaaatgtttcttacagagcagcttaaattattacagaaattcttattcagtttaaataatttggattatttcaaagttgtctatgaagattttcactctaaggatttgtgtcacttttttgcttgtctttttctagaactacagccatcagtctgagatacaacataaaagccacatggctaactgtggtagattcctttctgctttcacactcatgctcagctgagctgcaacccaaatagcaatttttctcaatatctaggcacgtgtgctaatcagcatccgcttgactgtttaatcagactccatttacaattctttttcactattaacatttagtgctcttctagcaaaactgacttctcaataacatccttcacatttttaatgagtgtttcttaccagtagtattaaaaaaaaccctgaatatgctatctggcagccctactttataaaagcatgtacataaaagagaacattccccttggctatctacaacgtgcacccgtttcattcatggttttgatgctgctctcccgaagcatccctaccgttctccttgtagcccatccccaggatgacctcaggggctctgtaataacgtgtcaccacatatggagtcatcatgaagcttgtgcctgctgtcctggccagtccaaagtccaggattttcaatgtgcaatcagacttgactacaatgttacttggttttaaatcctaacagtaaggataagggaaaaaattaaaagccagtatcaagtgaaatgttatttccattgactcaatcaacatagccattttgcagtagcactgatgaggtcccccttgcctacagagctctaaataaggcaaatgattactgctacaaataagttaactattagtttttggaaagtgttttaatcccagaaaagaattgtattatcattttcacaatttacactaatcttgggaagaggttttagaaaaaaaaatatttattgtcttctgttaggtttctccttaggacaacataaatctttcaacatatatatcatttctaggcctgacagaagaacagatcagggaagctgtctttatgctgccagaaacatctatggaaatgaattttcttatttcagttgcacatatgacttctgccaatcaaggagctgaaagcatgaggcttctaagaagctgcatctcaatgagccaaaacataacattgaacaaactcaactacaatataactagaatttccttctacaattagtgaactaggtgctaattctagtatcaaagaaatgaggaagtatattatatttgaccaatgccccccgtataaagaaaataatctacagttactcttcctcttaaagcatttgaattgtaatcctagagaaggtgttcttaccctgtgaataattccagcagaatggaggtgcttaatgccacacaacatttggtacagcaggtaagacattcgctcatggtctaattccatctgaatcacttgacataagttggcatccatcagttccattactaagtaactagaagggtgaatccacagtgttagttccagatcacaagatctatgaagtcctttgatttagtcagaatgctctcctaactctgtaagtcttctgaacttcttagctctgcctttgacttaatcaagactgagcatttccaggtattgcatgtgtgttagctatacgaaccctaccaaaaggttgctagtagaaaaagcatttattaatgtctggttcatgtccacagatttgttaccttaattttgctttcactttcccctgtattccctcaactcttttgtgaatattataatttcaaataagaaaaaaattaaggacagcttcttccattaaattcaatgtatctgtattaaagacaaggtgctagggaatcacttcctctcctccatctgttgtcactactgggtagactttgcacaaaatcaatgacactataaagatagaaagaataaagataattttcacgtcccttttattactatttctttttgtttgtttgttttgagacggagtctcgctccgtcacccaggctggagtgcagtggtacgatctcagctcactgcaacctccgtctcccgggttcaagcaattctcctgcctcagcctcctgaatagctgggactacaggtgcatgccaccacacctggataatttttgtatttttagtagaggtggggtttcaccatgttggccagcatggtcttgatctcctgactttgtgatccacctgcctcggcctcccaaagtgctggaattacaggtgtgagccaccatgcctggccttattactatttcttcaggtaaattaactcattgtagaaagtttgtggaatctattaataaatataaataaataagccttccctgagtgaccaagagcatggaacaacaaagtatataaagccacaaggccaaaaggaggcagaatgtctttccaggaagtaaccccacaaacagaatcttctttacatatcactggacccctttcatttgaccccacctcttacctctctttgagcagtataagggatttcaactctgtgtgtgtgtgtgtgtgtgtgtgtgtgtgtgtgtgtgtgtggtgtgtgattttcccttgggctatctgagtgctgtgctctcccttccttcatgagttttgttacttacacatcttggaactcctccagcgttttctggggtgtgaagacatttaataaactaataatctgaaagagagyggaagggacagaggaaacgagagaaagaaaaaagagagagaatgtattatttttaaattgtatttcaactcaaagtcactcactagtgctatggcagaaatggagaagttggaaaaatgtcttgagctgtctcagaggacacagaaaagtatgctcagaaagaacagatgatctgtcttcaggttaataatgcagctaaaaagctcaattcttgggcagaagcaagagtcagagagatgcataatt

SEQ ID NO: 3 - DNA, 147700 bp, Homo sapiens
  misc_feature (51510)..(51510): n is a, c, g, or t
  misc_feature (51526)..(51526): n is a, c, g, or t
aaagccaagactcccattcctaaaccctagctcaggtctccatctcttaaatccgagtgacctctacaaactctccctgagaaggtgtccagaacccttttggaagcgagggacagtgtcactgtctttggggttgacacctgctctgagtaactcacggaaaacaagttccagctgggaagcccttggacgcgccacacctccctacccgcagcccgtcctgtggcgcccgggactccagagtgygtttagatgaaaggggaccgacacgtcagggccaccgcgggaagcgctgagggccactcaccggccagggacgcgaagagcgcggccgccgcgctgagctgccggggcatggtgggcgctgggcgaggttctgcagcgtgcggcgargtccgggcaggccccgaatcggtgccagagaaacctacctgtgccggagaaacgaaaccacctgcttatgagaagcagccgaaaagcccgcccagggccgctgggcggggagggaaactccgccggccccctcctacccctacggagcagggaggggcggggactcggcgcagccgccggggcccgggcctctgggaccgtttaccgcacgcgcgtggtcccggcagcgccggcstcctccgctcataccctgggtctcctcctttctttttcttttctttttgagacgaagtctcgctctgtcgcccagggtggagtgcagtggcgcgatctcggctcactacaacctctgcctcccgggttcaagcgattcttctgcctcagcctcccgagtagctgggattacaggcatgcaccaccacacccggctaatttttgtatttttagtagagacggggtgtcaccatattggccaggctggtctcgagctcctgacctcgtgattcgcccgcctcgacctcccaaagtgctgggattatagacgtgagccaccgagcccggccagggtctcctcttttatttcttttctttttatttcttttgttttgttttgttttgttttgttttttgagacaaagtctcgctctgtcgccaggctggagtgcagtggcgggatctcggctcactgccctggttcaagcgattctcctgccgcagcctcccgagtagctggggttacaggcgcccgccaccacgcccagctaatttttgtattttagtagagacggggtttcaccctgttggccaggctggtctcgatctcctgaccttgtgatccgcccgcctcggcctcccaaagtgttgggattacaggcgtgagccactgcgcccggcccagggtctcctcttttctaacagctcgggtacctttctgggaacccagagacgcttctcagccgggagaaagccagccactaggcgagcaggagcctaaaaacccctaagcaccctgactccatgtcttcccagggagtctgcggcagccgcgctccacgcccaggcctcgccaggaccgcggtttgcgggaagcaacaggagcacagcccagaggcgctaggtctggctgggagctcgcgctgccgactccccggcgtgcggcgtcggggaacctctaggagccttggattcttcagctgtaaaacggacataataatgcccactcccagtgtgtttttttattttcttttttctttttctttctttgtttttgtttgtttgtttttgtttttgtttttgagacagggtctcactctgtcgcccaggctggagggcaatggcgtgatctcggctcactgcaaacttgggttcaggcgattctcctgcctcagcctccacagtagctgggattacagatgtgcgccaccacgtccggctaattttttgtatttttagtagagaccaggtttcaccgtgttggccaagctggtctcaaactcctgaccccaggtgatccgcccgcctcggccttccaaagatctgggattacaagcgtgagccactgtgcctggccccaggtggttttacagaccagaaaatcctggaacaaaaaacacacaatatcgttttttttttttttttggagtcagggtctcgctctatcacccaggctggagtgcagtggcgtgatctcggctcactgcaacttcgacctcctggcctcaagtgagtctcccaccttagcctcctgagtagctgggaccaaaggcgcgtgccaccacgcccagctattttattttattttatgtagagaggaggtctcgctgtgttgcccaggctggtctcgagttcctggcctcaaatgatcctcctgcgttagccaaccattgggattacaggcgtaagccacggcccacggctcaacaacgctgacaggcaaccttttaatgtcttatctccttcctctattaattggattgtctgtcaaaacaacgatgttttgacagggcttgagtcccagtggggaatacacatttaagcagtatattaggagaccctccttatcactagattgagggctttcagcctagcctcaaattattttctgaaaaataactttggctacaactattttgtcttactatgttgctccaaacactaatcaagtaaacttaaccaaagcttgcagtgtgtttcagaatggaatttttatggtgaaaagtgagggttaacttgtgccagtcaacctagtttcagcaactacctgctttctgatctttgagacagtttattcaaaagacgataattaagtgggtatagactgtgtgccaggcactcttcttattccatttaagcgccatagccactctatatggacactgttgttattatcgctgccccatttcgcagatggagaaactaagcacaaagaagggagttgcccagagtcacttagataataaataccgaaacctgaccataaatcttgtctgccttgagagtctaggattttaagcacatagccgggcgcagtggctcacgcctgtaatcccagcactttaggaggccgaggcgggcggatcacgaggtcaggagatggagaccatcctggctaacacagtgaaacccagttctattaaaaatataaaaaaattagccaggcgtggtggcaggtgcatgtagtcccagctactcgggaggctgaggcaggagaatggtgtgaacccaggaggtggagcttgcagtgagcggagatcgcgccactgcactccagcccgggcgacagaaggagactccgtctcaaaaaaaaaaaaataaataaaataaagctgctcctcttaccctggaaattccaagggatttaggagctctgtttcaggaaccagggtcaaagaccaagtattaaaacaaaagattctcctagaactctggcatataaggattttaggagctctgtcttagaaactgggacagagaccaaagatatattattatatcgcagtatcatagtttattattttcaaaaaacgttttctggctggtacagtggttcatgcctataatccaagcactttgggaggccaaggtgggagggtcacttgaggccagaagttcaagtccagcctgggcaacacagggagaccctgccactattaaaaattttttaaattagctgggcatggtggcacatgcctgtagtcccagctacttgggaggctgaagcaggaggattgcttgagcctgagaggtcaagactgtagtgagctgcgatcaagcgactgcactctagcctgggtgacaaagccagaccctgtgtctaaaaaaaagaaaagaagaggaaaaaaaaaggtttttatttcaactaagttgttggatttattagcataaagcttttcataacaatcccttgtcttacaatatctgtagtataggtagtgatgtcacttcttttattactaatattaataatttgtattttctctcttatttccctgctaatattaataatttgtattttctctcttttttccctgataagtttggctggaggttgatcaattctattcatgttttcaagaaaaaaaaaaaaatttcatttcatcgagttccttcattgttcttatgttttctgttttattcatttctacctgatctttattattttctttcttctacttaacttgtgttttatttgctcctctttcaatagttttcaaagatggaacttgcctgggatatcccagcactttaggaggctgaggtgggaggatcacctgaggtcaggagttcaagaccagcctggccaacatggtgaaactccgtctctactaaaaatacaaaaattagctgggtgtggtggtgggcacctgtgatcccagctactcgggaggctgaggcaggagaatcgcttgaacccgggaggtggaggttacagtgagctgagatcacgccactgcactccagcctgggtgacaggagctagactctgtctcaaaaaaaaaaaaagaaaaaaaaaaagatggaagttgaggccagtggtataaaatctttcttcatctctaataaacaggtttactgttatgaacgtccctctaattactactttagttggatcccacaagtttaatatgttttcattttcatataattagaaagacttcctaatttccttttgctatctcctcgactcatggttatttaaaatagcattatttcatttccaaacatatagtttttcagatatctttcttttattgatttttaattccactgtggttgaaaacataattatggacttaaatcttacaaatttattgatatttgttttttgaccaagactatggttggttacattagttttcaggactgacataacaaagtgccacagactgggtaattaaaccacagacatttgctttcttataattctggaaaccagacatgtgagatcaaagtgtcagccgggttggttttttctttttccttttttttttttttttttgagacagagtctctttctgtcacccaggctgggatgcagtggtgtgatctcggcttactgcaaattctgcctcccaggctcaagcgattctcctgcctcagcctcccgagtagctgggattacaggtgcctctcactgcacctggctaatttttgtatttttagtagagacggggtttcaccatgttggccaggttgatctcaaactcctgatctcaggtaatacacccgcctcggcctcccaaagtactgagattacaggcgtgagccactgcacccggcccgggttagttctttctaaggcctctctccttggctagtagacacctttgtttcacatggtcatccctctgtgcatgcctttgtctgtcctaatctcctcttcttataaggacattagtcaggtaggattagtgcctactctttgaactcgttttacctcttaaagaccctatctccgaatatagtcacattctgagatacttggggttaagacttgtattagtccattttcacgctgctcataaagacatacctgagactgggaagaaaaagaggtttaattggacaattccacatggctggggaggcctcagaatcatggtgggaggcgaaagggactttttacatggtggcggcaagagaaaatgaggaagaagcaaaagcagaaacccctgatagataagcccaccagatatcatgagatttattcactgtcatgagaacagcacgggaaagaccagcccccatgaatacattacctcttccttggtccccccctccccacaatatgtggggattctgggagatacaattaaaattgagatttgagtggggacacagccaaaccatatcattctgtccctggtccttccaaatctcatgtcctcacatttcaaaaccaatcatgcctttccaatagtccctcaaagtcttaactcatttcagcattaacctaaaagtccacagtccaaagtctcatctgagacaaggccttccgcctatgagcctgtacaatcaaaagcaagctagttagttcctagatacaatgggggtacaggtattgggtaaataaagccattccaaatgggagaaattggccaaaacaaaggggttacagggcccatgcaagtctgaaatccagtgagggagtcaaattttaaagctccaaaatgatctcctttgactccaggtcttacatccaggtcacgctaatgcaaaaggtaggtttccatggtcttgggcagctccacccctgtggctttgcagggtacagcctccctccaggctgctttcatgggctggtgttgagtgtctgcagcttttccaggcacccagtgcaagctgtcagtggatctaccattctggggtttggaggacaaaggccctcttctcacagctgcactaggcagtgccccgatagggactctgtgtgggggctctgatcccacatttcccttctgcactgccctaagaggttctccttgagggccccacagcttccaccctctgaaccatagcccaagctatgcattggcccctttcagccatggctggagcagctgggacagagggcaccaagtcactaggctgcacacaacatggggaccctgggcctgccccacaaaacccctttttcctcctgggcctccaagcctgtgatgggagaggctgctgtgaaggtctctgacatggccttggagacatttccccatggtcttggggattcacattaggcttcttgctacttatgcaaatttctgcaaccagcttgaatttctccccagaaaatgggtttttcttttctgtcacatagtccggctgcaaattttccaaacttttatgctctgcttcccttataaaactgaacgcctttaatagcacccaaatcacctcttgaatgttttgctgcttagaaattttttccaccagataccctaaataatctctcaagttcaaagttccacaagtctctagggcaggggcaaaatgtggccagtctctttgctaaaacataacaagaggcacctttgctccagttcccaaaaagttcctcatctccatctgagaccacctcagcctggatcttattgtccatatcactatcagcattttgggcaaaaccattcaacaagtctctaggaagttccaaactttcccacattttcctgtcttcttctgagcccttcaaactgttccaatctctgcctgttacccagttccaaagttgttccacattttcaggtatcttcagcaacgtttcactctactggtagcaatttactgtattagtccattttcacactgctgataaagacatatctgagactgggaagaaaaataggtttaattggacttacagttccacatggctggggaggcctcagaatcatggtgagaggtgaaaggcacttcttacgtggtagtgacaagagaaaatgaggaagaagcaaaagcggaaacccctgataaatccatcagatctcatgagacttattcactatcacgagaatagcatgggaaagaccggcccccatgattcaattacctccccctgggtccctcccacaacacatgggaattctgggagatacaattcaagttgagatttgggtggggacacagccaaaccatatcaagacttctacatatgaattttggagggacacaatttaactcataatagtggactgtcytgttaaatgttctgtgtgcacttgagaagaatgtgtgtattctctcattgttggattcagtgacctataaatgttaattaggttaaactaattgatgtagggaaaagaaagagagatcagactgtcactgtgtctatgtagaaagggaagacataagagactccattttgaaaaagacctgtacttcaaacaattgctttgctgagatgttaatttgtagctttgccccagccactttgccccagccactttgacccaacttggagctcacaaaaacatgtgttgtataaaatcaaggtttaagggatctagggctgtgcaggacgtgccttgttaacaaaatgtttacaagcagtatacttggtcaaagtcatcgccattctctagtctcaataaaccaggggcacaatgcactgcggaaagctgcagggagccctgcccttggaagcggggtattgtccaaggtttctccccatgtgacagtctgaaatatggcctcgtaggatgagaaagacctgactgtcccccagcccaacacccataaagggtctgtgctgaggtggattggtaaaagaggaaagcctcttacagttgagatagaggaaggccactgtctcctgcctgcccctgggaactgaatgtcttggtgtaaaacccgattgtacatttgttcaactctgaaataggagaaaagctgccctgtggtgggaggtgagacatgtttgcagtaatgctgccttgttattctttactccactgagatgtttgggtggagagaaacataaatctggcctatgtgcacatccaggcatagtaccttcccttgaacttaattatgatacagattcttttgctcacatgttttttgttgaccttctccttattatcaccctgctgtcctactacattcctttttgctgaaataatgaaaataataatcaataaaaactgagggaactcagaggctggtgccggtacaggtccttggtgtgctgagtgccggtcccctggactcactgttgtttctttatactttgtctctgtgtcttatttcttttctccggctctcatcccacccgactagaaatacccacaggtgtggaggggcaggccaccccttcaattgatagtatggttcaagaacaaatggtatcaacttaggatggtttaacttatgatttttcaactttagaatggtgtgaagtctgtatgcattcagtagaaggcatactttgaatttttatcttttcccaagctactgctatgggacaagatactctctcacaattctgggcagtggcagcaagcctcagcttccagtcagcacccaatcccaagggtaaacaactgatacagccattctgtttttcatttttagcaaaatactcaataaattacatgaggcactcaatgctttattataagacaagctttgtattagatgatttgcccaactgtaggctaatgtaggtgttctgagcacatttaaggtagactatactatgccatgatgtttggaaggttaggtaaatttaatgcattttcgacttagaatactttcagcctcccaaatagctgggaccacaggtgtgtggcaccatgtgtggctaattttttgtggagacaaggtctcactrtgtcgcccaagttggtctcaaaatcctgacttcacgtgatccttccactctggtctcccaaagtgcgattacaggtgtgagtcaccacacctggccgtgttgtcacacattttaattctttataaattagaaacttcacaacacattgttcttatttaaaatttaaacaattatctttaaatatacataatatataaatatgtatataatatataaatatatacaatatataaatatataagatatattatatatataatatataaatatataatatataaatatataatatgtaaatatataatatataaatatatgtaaatatgtaatatgtaaatatgtaatatgtaaatatataatatgtaaatatataatatataaatatacataatatataaatatataatatataaatatataatatataaatatataatatataaatatataatatataaatatatattatatataaatatataatatacataaatatatataatatataaatatatataatatacataaatatataatatataaatatatataatatatataaatatatatggggaaaaaagcttttatacttactcatgtgattaccgtttcttgcagtctttattcctttgtttagatccttgggatttttgttgctatggtgaccttagttataccaggcacttcaaatcttaccttgtgtttaggawatgggcttgtttgcccaaaggtcttccctaatgtctgctccaccttcaactttaggtcttctctgctgtcagtttctctctccatacacttgtagctctcccaggagtattccatcgttacttgttagtcagtgcttattagcggggtggtgggatctgagaggtgaggtgcttggttgtgattctcagttctgattcctgcaggtactgtgtccctgggycttgaagggtatgaccaagcstctctgtccctccccgcagcagtagttttgggctcagcacatattcctgccccttccccagaatcagagggttttttgttgttgttgttttgtttttcaagtttttgttcctttttctccatctgtgttggatttaccagccccctaggagcgtcagtatttgttacccttcctccaggcttttaaggcctttgtaggagagatgggccaatagcatctgagcatggttttgtgtctttcttgtagcaactgatattcctcacccccaggtctatgccaggaaggatgcttccttacatgcctgtaatcccagctaccggggaggctgaagcagaagaatcacttgaacccaggaggcagaggttgcagtgagccaagatcatgccactgcactccagcctggcaacagagcgagacttcattcaaaaaaaaaaaaagctcttacactcttctgcatattctgcaaagtatactctgggaaggctggtttagaggatctctaacttttctaatatttcataatgcatggctgatgtttaacatgaactcagactcccatcagattttacagatctgggtctgcttttagttctaatgcttcagccagggcactttaatctgaggtcacagcattcccaattgtcagcagtattttgaaatctaagttcctctggtggacaacaggcaacatcatatagccayggaggatctgaacaacttctaagtctgagsgattttatctggtggttttggattcttttccatttatacttaaacaaggtgacacaaatgtcactcacagaaaagccactcttttttcccctgtttttaagaagtctaaaaatgcacaactatttcctgaatgagcagtgtgtccaggtgtagaatagggaatgtcgtgtccactgggaacagacggtgtacctggcacaattttatgagaattatcccatgattcctgtcccaccctgcagcccaccatgggctcagtggggagtctgagtctctgagccccaaagggtagctttttcccagacgacaccagcaagcagagcagcagcttggggctttgacaaggaggctggagtgaaaggtcatattggaccatcctggrtcactggaggacaataccccaggaacctccagcaatgactggtattggaatgactcccctggtcacccacctgtggcaagacatttgcaaacagggtcttcctatgaggcttgtgaggtttggccaatttgcattctgctagaattattaagtatggacatcctcatagatccagaaaagggccgagatccaaaggattgagaatgctttggggggtgtttccatagtgagtggctggctattcaacagtcaaatgtttgagaggatacaagtgatgtgtttcctgaggcaagtggtcagaacccaacagactcttctgttcagctaagatgagagaccatctgaagttcttacatgttctcacagagaaatggattctcatagggaaatggatatattgtgatagacactgtaagcagagaagttgactgagaaacacacacacacacacacacacacacacacacgtcaagactgaatgcatagatgtgtattataaaaagygtaaaaatacaccaccattstaacagattgtgtaggactatattttctttttttttaatttattattattatactttaagttttagggtacatgtgcacaatgtgcaggttagttacatatgtatacatgtgccatgctggtgtgctgcacccattaactcgtcatttagcattaggtatatctcctaatgctatccctccccccttcccccaccccacaacagtccccagaatgggatgttccccttcctgtgtccatgtgttctcattgttcaattcccacctatgagtgagaatatgtggtgttttgttttttgtccttgcaatagtttactgagaatgatgatttccaatttcatccatgtccctacaaaggacatgaactcaccattttttatggctgcatagtattccatggtgtatatgtgccacattttcttaatccagtctatcattgttggacatttgggttggttccaagtctttgctattgtgaatagtgccacaataaacatacgtgtgcatgtgtctttatagcagcatgatttatagtcctttgggtatatacccagtaatgggatggctgggtcaaatggtatttctagttctagatccctgaggaatcgccacactgacttccacaatggttgaactagtttacagtcccaccaacagtgtaaaagtgttcctatttctccacatcctctccagcacctgttgtttcctgactttttaatgattgccattctaactggtgtgagatggtatctcactgtggttttgatttgcatttctctgatggccagtgatgatgagcattttttcatgtgttttttggctgcatcagtgctctacacgttcagagaaacttctctagtgacgaactatagaaatgatccctgaaagtatagtcttaggactatattttcttttgacttgggaggcatgtttattgctgttaatgctgcaaagggctctacgtgctttaaaaaatcccaatctgttgcattcataagcctgggttggatctaaagcagcctcccacttttggaaaggcatccccacgacctttccatggttgctgaatgcagctggaggcagtcacagctggtgatgtccggagcccattccccactgtgctggtctgcagaacttctgcatgccattcccacaagcaggtctctgccctgctctcctccacctcccttgtcagaggaagtctgcacttcacagctttctggtctcaaccctcctccatccctacagatgtgtaagcagcaggaatcaaaaggtgaaggagagggggcaactcacctccgatggacacgtgaaaagtgggagatggataaaatcaagaaggagcttaagatatccagaaatgtaaactgtgtttggaaaagtaaggtcaggagaagcatgggactcctgaggttgctccctactatcttgcagacttgctgcaggaccaaatgaagcaggatctgtcaagcaccagggccagctcttaagcttagtgcctttctgaaccctgtgacccagcagcctccatcaactcgtcctacctgccatgcacagctcctctgtgcccctgtacctgagctcatgctattccctctgccaggatgcccttctccttctccaccaggagaagaacacttgccagtaagacccagttctaatgtcaccccttcctgacggtatcaggaagagtcastgatggtgttttatgctcccagagaatttgccacattgtgttgtgattatttttccacatctgtctcccccactggaatgagagcctcactcatcttcatacctccctggtctctacctggtgccagaaccatcctcagggcaggggaatgctcaggaaatagatattgaataaaataagtgtatccatccatccatccatccatccttccatccatccagacatatatacatatgtaaacattctgatggtcaaatggaacaatgtgggctgaagaataatgcaggtagaagaacctaagattacagattcttgatttgggaggaactttattttattgtgcaaacagtctacaaatttgaaacatactctatcaagaaagacactgttgttaggaaagggcgtgggagagggtggccccacaaaacagtgtaaagttctaaagaatttgagaggaacactctgcgggaccctgttccaagggcatctttctaagagtctgtcccttaggctctgcccctttttggccacgttgtcaaaggccttctttatgaacgaagtgagacacattatttttgttttcttgaattctaaagtgattgtcttgagttccctgggggagactcctgggaggtgtggcccactctattccagaaacaaaccaggagactgaagactcatcccaatcccatatcccatgaaaatgtgaaatcaaatcacccctgacaattccaaaactaayggaatcctaacataactctatgtaactctaaagctgagtgtgctggtaattaagcttccagcccacccttcccagctctggggtgcagggtcaccatgggctccttcctgtgtgcaccccaccccacccccactgtcagcatcctgtctccaccctgagagtgacagctggttccagtagcgggagttggttccagcttgccattttcctagcactcctataaccagcctgctgatgcccattcagagacagcagcacgggctggccatgtcccctctccagaattctgcgtccagctcctggaccttgagctctgagcccttgggccacgtgtacmattaatagtgcctcctcctcagaggactaacccccagccctagggccaccttcatatttcygagttttgatattttcaacctcttttctttgttgtatgagtccttgggctgggagcttgcagtcaaaatcttcatgatatctcattatcactacttttttttaaatctctactagctggataacaattatttatattaaattctctcttgaaataactgatacagtgtctcttgattgaaacttgactagtagactaagaattctaactctaaataattctgagggccgggtgtggtggctcacacctgtaatcccagcactttgggaggccaacgcgaatggatcacctgaggtcaggagttggagaccagcctggcaaacatggcgaaacccggtcaggagatccagaccatccyggctaacatggtgaaacctcatctttacttaaaaaaaaaaaaaaatacaaaacaaaattagccaggcgtggtggcagatgcctgtagtcccagctattcaggaggctgagacaggagaatagcgtgaacccgggaggtggagcttgcagtgagccgagattgcaccactgcactccagcctgggtgacagagagagactccgtctcaacaacaacaacaacaaattagccgggcatggtggcaggtgcctgtaatctcaactacttgggaggctgaggtaggagaattgcttgaacccgggaggcggaggttgcagtgagccaagattgcggcacttcactccagcctgggtgacaagagcaaaactccatctcaaaaaaaaaaaaaaagaaaaaaaaatctgacaattaaataaagaacagaaaaaaaatttgaatggcaaatacaaagctgaaaagaaataactgagaataaataactctgaaaatagctcaaaaactaaatacctcaaaaactctttaaaaattcagaaaatataatgttcaaatatgaagtaatgctgaaaatgaaataactaaaaaccaagtaacttgaaaaaaagaacataaaaataaacaactcaaatataaaataactgaaaataaatacctgtgaacataagcaactcgaaaaccagataactaggggaaacccttcattaaaacatttcactctgaaaataaataacttgacagtagttcatgaacttccagtgagtgtttaatagtcaaataagttactgtaaaaataaataactcaaaaactccaataagataaagtgaaataactatgaaggtaaataactcagataataattgtaaagataattaaaaataaattccggctgggcgcggtggctcacgcctgtaatcccagcactttgggaggccgaggcagggggatcacgaggtcaggagatcgagaccatcctggctaacacggggaaaccccgtctctactaaaaatccaaataaaaaattagccgggcgtggtggcgggcgcctgtagtcccagctactcaggaggctgaggcaggagaatggcgtgaacccgggaggcggtttgcagtgagccgagatcacaccactgcactccagcctgggcgacagagcgagactccgtctcgaaaaataaataaataaataaataaataaattccaagcaaattaatttgaacatctgtaactcctaaaacaaaacaactacatataaataactgaaaatgaacaactaaataactttgaaaataaagtaactataaaccagtaactgaaactataaaattaaataaccagaaagctacaaagaaatgaaaatcaactaataaaactaaaaataaaatacaactgaaactaacaaaactcatttaaaaactaataaatcgatacataaaatacctcagaaagtaacttggaacgaactctctctacaacgaagcaatcttggcactaacacgaacaccccatgaacgctcgcagggatgctgggaggcggaccgggagctcccagtctgcggcccccgccgggttkgagcggctccggctcctccaaggctcgggctaagcggctctcaaccgattcccaccccgccctggagaaatgcgggcgtgtctgcaggcatttttgattgtcacgatttgggggcggggtggaggatggggtggcgcattcctggcacctagtgggtagaggccaggggtgctactaaacatcctaccgtgggagcacagagaagcccacgcagcaaagaattgcccggctccgaatrtcgaagtgcgcggtcgagaaggcgtgggctgcgggctctgctcgcctctgcaggcgccttagagcagctccgaggtcccccgtgcggagctaggcgcgcacccaggacacccctcgggctcctcggaggaggccctggttgtcccctttctgccgccgccgaggctccggctgctttctgcgtagctgggcagggcccgggcccccacaccgcctctcccgggaatgcgggcgctctggagccgaggagcgggggcgtccgcagggaggtcagctctcctgggcggaggtcctcgggcgcagcgccctcgcctggaaaccagccgtcgcccccgcaggagccagccggcccgtggacgccccagcgcgctcctcctcggtgctgcgggtcgccctgcaattccgagaagaaagtcagagacgccgtggcccaaagaggcgcttagtctttcctcgctcacactcacgtttcctcctcatcgcgttcttctttttctccctggctgctttctcccctctccaggaaagcagatttggaggaacaggtttcgtgactgtcgtccgactggaaaaggcccgcgagctggaagggaggggacgggtgcaccctcagagttattgctggaggctgtggccagaccgggcaaggtggtgactcccgctggcaggctgaggcccaccccagccctcccacctgggccacggggctctcagcgggagccccagttatgaccggacaccagcgcaccgccaaggagacagccacgtggggacatgctggactaggagggtcagagccagtttgagggtctggtgacctcggctccctggcttaaccaggtccttatgggtgagaatcctgaggagggggagagggatggaggctagggacaggaggcaggaggagctgatgaataggaaggagggaagaagatgaaagaaacaaaagggaagtaattacactcagagcactgctctccttttccatgtcttctgcgccttcacagtcttcaaaggtgtccatggagctaaactccctgctggagcagccttagggagagaaagggaaggatggggcctctgtggggtgggaggacatcccctctgcccatggcagggtgtagcaggcagtgcctgttgcaggcacggtcctccccatctctaactcctgctctccaagggcctgcactgcgctgggctgtgagggggtctgtgatctccaggctgcttttccagcgccgagatgccgtaattcaccgagaaggcgcgtccacatgctgttcatggccctacctccccgttcctccaagaaaacagtcattgttttttgtgtttgccagtcttctaaccacgcctccttcccttcctcctcccctgtctctttctcaccctcccctccttgcctccttttctctcccctaattaatgtccatttcccatctccctggcagcctctgccaagtgtcactgctccccataagggaaaatcagaggaacaagcaagtgcatccatcctgcctctctctgcagtgaactgattaattaatccatcagtcttgtctatggcgcacatgttacatccctggggcggtgttggacactgtggggaacagcagccactgccaaatactgaacaactgccctgtgcctggtggtatgttaggcatttgtcaaagtttaagcctcacaaccctgtaagggtctcagccccctttacagttggggaaacagacagcaatggtcacttggccaagtcctcttggcctgtggcagggcagctgtcttctccagcactcctgctctttaccctcgctctgagtgagatggagtctctgccccacatggctcacaagccagggtagggagcagagcatctgcagaaaggtcccaacacaggacagccccagaccgagggtcagctgagtagtctacgcggcgggagccgtgctaggaaagtgtctgctcaggcgagaattcagggaggtttgggcaggacttgaggggcagacaggactggagagggagggcattctgggcagaggcatggccagagggcggtaggcggcagtggagggagctgcagttatctgggtgagcaggcagcacaagtrgcgtctcctgggctgctgccccaagcccccaacaagccacgttctgggccccaggccctccccagagcagatcagtgggggctgtgtgagtaacatgggggcgggggggcagctgggcagcacctccctggaggcccctctgaaatcctgcctgactctggcaggctccgagggggctggacaccctcctctcaggttgaagcaagtcctggttgagttcctagtcccaggaggtgggaggggcaaggggtggagggcagaggagaaactgcctcagggatgtgccccctgccttcatcctccagacaggacttgggagcatctaaggaaacccaagactcctctttagagaagtcatccagccctggggtccccttatgccaggagcaagcagtgagaatggaagaatgattgtcttgctgaaagttctgtgatggagggatagagggacagagggagccatgcccttgaccatcccctgcatgaataggaagggctgtgtctccagggtccatggcctctgtgccccggatgatgccagggctgctagggaccatagagccacccactgggaggctggcggttgggcctggctcaggagccttcgtcagccataggcagccacagcctggggtgggcagggctgggaggcgacacaggaactgaaaaacctgacaagctctagcccctccgcagggtaagtggtacctccaggtaaaatgattagttkgttccagcccctctgcagggtaagtggcacctggggtaaaatgactgcctggagctggcagctgctttccctgctctcgcgggccctgcagggaagcggggaagggaagggggcacagcgctgggcacagaggggctctcagaccctggactcaactgtttcagggtcatctgaaacagtcaactgtttcctctagcccattccctgcctccaggcgaggatttgcctgaacgtggaaagaggaaggatcctcccagtgctgtcaaccccagattccacctccctgtgggggactgtcagcgcaggccctgacaacgcagagaaagacacaggacccacctgggccagtgacagcaggagctccgggtgccacaggtgagggtggggatgcctggagcaccacggggggcctggtttagtctagagccaggttttccatacaccttagagtgcaacctcagggagatgcaaattttaccccctaacacagcatacacgcagaaacacatttatacaattcaaacacaagcggacggaacaatatttacccttagagtgtgtgaagtcctcatctgtcccacctcatcctatcatgctttgttctatcctaggagacaaagcaggagggggggctgcggaggtgggggagtctcatccaagcccttgggtgacacgtctctcctgagacaaactgcagctgctctgggtgtgccctcgcctgtctccctccaggccccgggttcctgccagcagagacagtaacctattcaccaggtatcccccagggctcctggaagaaactcagaattctcagaaccagaaaaccttagagagcatcctgcaggcaaagcccctggttctctgcggaggaaagtgcggctcacagggtgccccgccagggatggtaattgacyaccaggctgtgtgccttgtggggactggcttaaggccctgtgggagctgagtcagggccaggaccggggtgtcctgactcctagagatcatgttcccttcctcacccaggccttccagtcccagccctgggcttttatttatttattttggagacagagtctggcttgtcacccaggttggagtgcagttgtgtgatcacggctcactgcagccttgacttcctgggttgaactgatcctcccacatcagcctcctgagtagctgggaccacaggcacatgccaccacacccagctaatttttgtattttttggtagagatggggttttaccatgttggccaggctggtcttgaactcctgagctcaactgatctgcccacctcagcctcccacagtgctgggattacagatgtgagccatcatgcccacctcctgggctgacttttgctgtcttacatcatctgcatatttaatcccctgctggattcactggtcatgggctctgaggccctaagagtcttaggcactaaggagctggcagcactgaggggaccccaaaatctcagactcaggatctggccagtcacaggcatgtgagggaacaactgagaggcccattgccccatggcaggagaaggtgctctggagtcagtcagacctgagggcagtcagacctgattctcactctgtcactcactagctgtgtgatcttggatacatcacttaacctcttgagcatcagcttccttatctctaaaatggagataataacatcgattttgcagtcttggtatgaggattagcaaatcttctgataaagaaaaatgcctggtacatcataggaattcaacaaatagtacctgttatgattattgtgtatagcaattacaataatactaaagagagggtctcaaaacagctctgggcactccaggtgtgctattattacttacatttcagggaggtttgtctgccattgtctcatcctcataaacactcagggaaagaaacattataaggataataaatggctttaaaaagaaacagagcaaacacacacacacacacacccctcagaaaaaccatgccaaacacacaggctcttgacaaatattcaatctgattatagcaaaactgttttgttttgttttgtttttttgtttgtttttgagacaggggtctcgctctgtcgcccaggctggagtgcagtggcgtgatcttggctcacagcaacctccttctcccgggttcaagcaattctcctgtctcagcctccagagtagctgggactacaggcacatgccactatgcctggctaatttttgtatttttagtagagacagggtttcaccatattggtcaggctggtctcgaactcttgatctcaggtgatccacctgccttggcctcccaaagtgtgagattacaggcgtgagccaccatgcccagctgattatagcaaaattctaagtgatagttgtattcttggaaaatgaatggaacgacttttgtcccagccaagatctagtggtgtgttggagcagatacaccctgagtctctggggcactctcagtctatgtatcagataagcataaggagtattggtggagaaggacaagaatgggaaaggtgggcgatgagaattcctgcagataaggactggtgagagtattctcttttgaaacccttagtcgacaatctttctggtgcatatcagataagctgaatggtttaggaaatctagtgttcacatttagtgcttagaattctaagcttttttattttgcttaaacaaatggaatgaaatttattaacaagtgaacctagtaatgagctgaaattattctcaccagcatacatatttttggtaaattatagactttgaagacaaaatcatggtgtttcccttactgtccagtggatggcacaaagagaccattgtagatcctgctggttcagcggtagctctcaatccatagatattaaatgggcaaattctatttttattgtctttcaaactagatttttctcaatgcacaactttttttttctttttcttttttttttttgagacggagtctcgctctattgccaggctggagtgcagtgacacgatctcggctcactgcaacctccgcctcccgggttcaagtgattctcctgcctcagcctcctgagtagctggggactacaggcgcatgccaccatgcccagctaatttttttgtaatatcagtagagacagggtttcaccatgttggccaggatggtctcgatctcctgaccacgtgatccgcccaccttggccttccaaagtgctgggattacaggcgtaagccaccgcgcttggccaattatgcacaactttttaaggaccatctctatcacatgaactaaaggatatcattttcacttgggggtgggaagtggtgagctgcttaaaagcaatgcctaaaccccctgggctttccttcctttcacttggaagaaccagggggtaactaactgctaacaattccatgctttcagagatctaggcgcaagcctaagggcttcatctcatttaatcctcatggcaagactgtacagtattatctccattttgtaaaatgaatgataaaaagaacttaagcacagacaggctatagaatccatccaaagagatggagctgcacttgaggctgggtctttgagacctgagtttgagcccttcatcattgtgttgtgtgtgctgctaaccaatttcccctctctgtcttctaggatttaatacatggtgtcacattctgtctgatccatcccagtagctctccagagctcccaacaggagagagttccaaaatgtttccaggggtactaggctcggttacaatattttgcttggtggcccagagtataaacgtggatatcttaggctggtctatagctgaaacgtctatttcatttgcaagcctatctttggctaagaggaagtgaatcattcttgagaacatctaattaattgctttcagattccacatgttgacattctcagggcacattttttttttcccgtgcatttctgttgtcaaagtccctgccagctcctaaggcagtctgagctggctgtcttagactttcagagctgctggaagcttgggggagggaggggctgtaggtcaaagaaactttataacctagctttacctcccagctcagccaccagctgccctcaaatgttctggattggaataagcccaaagatgagtggcaggagggaagggcaagccaatacgtctagtttggttcagtcaaagccttgcccatttcatcagaattttaatggaaaatttccaataagattaaaatataaggtcaccccaattttagtatggctccatttaaaaaaaatcatgcatatctttgttttgcaatggggccttactcttgcccaggagaggtgcggtggtacaatcatggcttacggcagcctcaacctcctgagctcaagcaatcctttcaccttggcctgccaaatagctaggattacagacacccaccaccatgcccagctaatttttaaaaaaaattttttgtaggtccagtgcagtggctcatgcctgtaaatctcagcactttgggaggccgaggcaagcggatcacctgaggtcaggagtttgagaccagcctggccacaatggtgaaactgccgtctctactaaaaacacaaaaattagcgaggtgtggtggtgggcacctgtaatcccagctactcgggagactgaagcaggagaatcaattgaacctgggaggtggaggttgcagtgagccaagttcgtgccattgcactccagcctgggcaacaagagtgaaactccgtctcaaaagtttttgtggagatggggtcttgcgatattgcccaggctggtctcaagctcctggatatcaagtgatcctcctgctttggcttcccaaagtgttgggattacaggcatgagccaccacaactgaccaaatcatgcatttctatagacaacgtctgcaagaagatattaatggtgattatatctggttatgttggatttgtatttttatttgtactttcctgtattttctaaattcctgacattctacatgtgtactcctttaataatcagaaaaggaaacttaaaatagttaaaaccaattggtcagatatgtaaaataacccaccatctctccagagagggctgtttgctagaacttattttcttcattgaaatactagagtgccccaataagtttgaataacacaaaaaaaaagataatgaaagtaactaaattatctaggcccaaaaggaaatgccacaaaaattggcaaagaaacaaccatgacgtgctataccggatagctcctaggcccccttggagaccctgaggtacccgacgagggacctgtagtaaggctggcagacaggttcttcctctgttagctctgaggtacaacagttattctcatttttatgtctttcacatggccagaactttgcaaatcagaggcaaagtgaattcagaattaaaaattttcagcaccatccaagtcagtaaaacagtcttagcttataacctttattttttttattattttattatttttttatttttggatggagtcttgctctgtttccaggctggagtgcagtggcatcatctcrgctcactgcaacctccgcttcctgagtccaagtgattctcctgcctcagcctcccgagtagctgggacgacaggcatgcgccaccacgcccagccaatttttgtatttttagtagagacggggtttcaccatgttggccaagatggtctcaatctcttgacctcctgatcctcccgcctcggcctcccaaagtgctgggattacaggcgtgagccaccgcgcccagccctttatttttactgtaagctgccagtaaacagcacacccacctgtctgctgactgtcccatctggaagttgtgtaggtccttactgaatcttaccttcttcccttcccctacccagaccccatcccagctggcacgtggaatcctttccctttctcctcatgtcaatagaccagcaggcaaagagagcagttaccatagtggaaggagaaacgggtcctagtcgtggtgaggaggtagggctgctgcttaacaraggccgagagggacatgtctgatgctcaggtgatccactaggacatctcgcaatactcccatgcccagctgtaactatgatggccaagtccaagaaccatagcctgataagagtctaggacccccactatacatgccaccagtagaagtgcctgatggggagagggatgtctagaatgagtaggagggaatgatgacaaagcacagccaaggaccaactgcagtggcaggtggcagccacagattgagttaagtaggattcttgctgtgttccctagtggaagcatctcccttgttgagacccactgaggttaaagttggagacatggggagaaaacaatgtccccgtgttcatcactagagtcatgatgggcaaggtcacaactcatttgacttcttggctcccagattcatatactctgcctcttgggggcacttcaccataatacagccattggttcagttgtatgctgcatcctgagggacagcactccatccccgcagtgccatgtccaaactgctgccccgcctcactctcaagaggctgtcccactactctgtcaggcaccagcttctgaatgcagtggtaagactctgtcctgtgatcacgtctatggctgattctcttttgccatactgagtcccctgatcaaagcagtgttatacagcctggcgcgctggctcatgcctgtgatcccagcactctgggaggcagagggggatggatcactagaggtcaggagttcaagaccagcctggtcaacatggtgaaaccctgtctcctctactaaaaattcaaaaattagctgggtgtggcatgagcctgtaatcccagctactcggaaggctgaggcaggagaatcacttgcacccaggaggtggaggttgcagtgatccctgatggtgccgttgcactccagcctgagcgacaagtgtgaaactctatcgcaaaaaaaaaaagcaacgcttatgattgatcacacactgtactttctaacctgaaggggtctggtaaaatcaacttgtcttctcaagggacagtaccaaactgggggctcagcactgacctctgctggcatgtcggacatttaaaagtggtagcagctagagcagtcttgaagacatggagccctcactgctggggccgagcactgctgggttcaattctgctaccaaggcttctccatttccgagcccatggtgcaggcactggggtgcctaagaggaagtgcactaactggacttctgctatgcaccttctttagggggcattaaagcacagttcaaagactctcacattttgagttaacccccacaggcctgtgtgccccttctccagtcaggtcatgttgtcatttgatcctagttattattctgaaagggttcaggaagggaggtggggacagatcttgraaagggcaaacattgccttgtatgcctcatctgaggcttccgcatagtcttaggggactgggaaccgtcttaagtgaatctcaccttcttcccttcccccagccaggccctagccctactggcatgaggaatcctatctctttgtcctcatgccaggagaccagcaggcaaagagagcagttaccatactggaaggagaaatgggtcctggtcatcagaaggaggtactcctcaagggacagtacctgagggagacacttccactagggaacacagcaagaatcctacttaactaaatctacggctgccgcctgctgctacagttggtccttggctgtactttgtagtacaaggcgaagtaggccactgctgccagcccaggaggtcaagggcatttacccagacatcctcattcccagtttttgggtcccttatcttccctctcaggatctaatgactcatctactggcactaggagtccaaaatgaccagatggcagactcgcctaggctgagaattcttccttctctcaaattctgccacttttaccagcccagtctgcctctgctgtaggagatgagaggctaaatgttggcagggaggccccctgattctgatcctgtgttttaaatcgataattagtcygaccctgttactttctcccttcagtgcatcaacgggaggctcttagcaacagcctcccaactctaccttcctgatagataatattttcctcaaagctctcaaatgctagagacattgcaccagctggygtgtccccatccacctgtatctgatcccaggtcaccacaggtgaaggtctgagcaatcgaactgctacagcaggccaggtaccaggactctcarcacgccacttaacaccaataatgaggtcctcatggccatttggcctgcagtgagccaacaccagaatcccatccattctgggacccctcctgctactaacggtcttcagtcaggttccccagaagcagattatgcaaatgtgttattgaaaaacggctttcagatgaaacctggaagacagtgaaggccgaagctagggcagggaagaagccaggcacagacgtgggcttagcagaagtctagcatcagcctgatcccctgggcagtactggagcatggatggcaccacaggttaccatcttgagacagaaggactggcttctgtaccctgaatcagtaagccattggtgggccataagccacccttaggggaggacataacctcacaggcatttcctggctggacgaccctgggcagctgagggcaactgcctgaagggcacaacggtgagccattgtcagctaacctcacagcagcagagacatggggccaacagcctataaagagggtctgggcaggctgtcaatactctctactgtaatactgtatatgtggtttattttaaaaacttttttagaaggctttattttattttattttttgagaaggagtttcgcccttgttgcccaggctggagtgcaatggcgcgatcttgactcaccacaatctctgcctcctgggttcaaggaattctcctgcctcagcctcccgagtagctgggattacaggcgtgtaccaccatgcccggctaattttttgtatttttagtttcatcatgttggcctggctagtcttcaactcctgacctcaggtgatccgcccacctcggcctcccaaagtgctgggattacaggcgtgagccaccgcacccggctgactttatttttttagagcagttttaggttcacagaaaaactgagaggaaggtacaaagatttcccatatatcccctgtgctcacacatgcatggcctccctatcaccatcccccaccagagaggcacatttgttacaatggatgaacgtatacactgaatatatcatattcacccaaagtctgtagctcacatcatggttcactttggctgttgtacattccttggatctagacacttttataatgacaggtacagtagtccccctttatcctcaggggctacttccaagatccccagtggatgcccgaaaccgcagagagtgccaaacttgactgccatcagtgggaatatgtttctattcgccttccaccaccaccggtttaacgcctttttcatcttagtgctgctgccgtaactttggcagtttgagatgcgacagcaaaatgagtacaaatttctttctccttcttcacaatgtcatggacagatgattccttcttaccatagatcttagcaacctcggtgtgtgattttttttctttcttgttaaatcaactttcaccttttcacttaaaggaagcatttgacggcttctctttggcatatctgaatttccagcatcacgactgtgctttggggccattgtttgtttatttatttatttattttatttatttttttgagacagagtctcgctctgttgcccaggctggagtgcagtggcgtgatctcggctcactgcaagctccgcctcccaggttgacgccattctcctgcctcagcctcccgagtagctgggactacaggcgcccaccaccaagcgcagctaatttttttttttttttgtatttttagtagagatggggtttcactgtgttagccagggtgatctcgatctcctgacctcgtgatcctcccgcctcagcctcccaaagtgccgggattacaggcatgagtattttatttatttatttattttttcagacagagtctcactctgtcggccaggctggagtgcagtggcaccatctcgctcactgcaacctccgcctcccaggttcaagcaattctctgcctcaaactccggagtagctagaattacaggtgcacaccaccacgcccggctratttttgtatttttagtagagacaaggtttcaccatcttggccaggctggtcttaaactcctgacctcaggtgatccacccacctcggcctcccaaagtgctgggattataggcgtgagccaccgtgcttggccttggggccattattaagtaaaataagagtcacttgaacacaaacactgtgatcctaacagtcgatttaatcaccaagatggctataagtgactaaggctggcggggtggggagcacagacagcagggacaccctggacaaggggataattcgtgtaccaagcaagacacagcggaaggcgccagatttcatcgcactactcagaatggcatatcatttaaaactcatcgattgtttatttctgtaatttttccatttgatatttggacagcagttgactaagagtaactaaaacctggaaagtgaaacagtggataagggggtgctcctgtacttctcaatgtgagacatttgcccttcatgttaattctgccccattagytctacacaaatgaatagcaggaaattgattttaaaccacatggtggtaaaatgctttcttttttctccctcatttaactaaagaagggctgggccctaggtgatgtcttccttagcatctaagcagctggcatcaccccactgcttctgtgctccactctcccatgggaccctccctacctttaatccctcctgtgctggaggccgggtcttccttgctagtggtagctctttccatatttttaatccatggtccggatcctgctccactgcctttgctttagagaaataaacatgaatattgagtcactggaaggaatgacacacgcatccctcccccaccagttggagtaacgctggcccacctagtgtatctctggtctaggtctcgaggacctgctgctcctccctcacctgtagttgaagacctgcctcaggtcagtaggtgatacgcagtaaggaaatgtccaaaggacacttcttgttggattacacagcaaacatctaattggctgcaaatctttttttctttttctttctttttttttttgagacagagtctcgctctgttgcccaggctggagtgcagtggcgcaatcttggctcactgcaagctctgccacctgggttgacgccattctcctgcctcagcctcccaagtagctgggactacatgcgtgtgccaccacacccagctaatttttgtatttttagtagagacgaggtttcaccatgttggccaggatggtcttgatctcttgaccttgtgatccgcccgccttggcctcccaaagtgctgggattacatggctacaaatcttaaagggggaagagatgaggaggaataatcccctttgtcttctcaaaaatgttttcactggctcactacagctccctccttcctctttactgacccaaaatgccaactattatagtaactcttttgggttagacgaatccagtgaataaacacctactaagcattggaggtccaagaggaataagatatgcctgagctaaacctcatcacccccggccttgcttgcagagtggtttgctggcctcatctgattattcaatgagtgctttcatttgtttattcactaaatatttactgagcacctacaaaagtgcctggccctggtagatgaggcctgagggaagctaaaactaataagacaaactccatgccctagaggaattcatggtctcatagggagaaaatgtaaacacatcataaaattatagcttattaaatgctgcaatagagtactccgtaagagtgtgggggcagagaggagggggagaaacagctgctttctagagccctcaccttttccacttctctcatctttctgggttagggtctagcgggggttccatgaggatcaggctaaatgagcttagaaaaactaagcagactactgtatcagaactggatcacagtagacaggcgttttcaacaaacatatattgagtatccctgagtgctttggacaggaagaggaattatagacgaagattgtaagtcgcagtaatagatgaggcaaggagcaccagtgaggacttaaccctgaaagaagtgtgagcacatcttcctcccagacaagggggaataaagaaaggaagatgatcaggagagttctaagtggaactcagcagccagaggggaagcyggaggaggtaacatcagagggtgcgtttgcccactcagtaaagtaggaggcagggcagccttgtgaaaataggaatggaatagaaagctcaagaaaacagccaaaagcaagggcaattaggggaggtttcgaactggcagatctacctcaactggcaatacagcaagcatgcaccagaaaagatatcctagctagcagtggggttgggaactgatttaatatcctaggctagcagtggggttgsgaactgatttattatttaattttttatatctattcatgtatttatgcacttatttatttttgagataggctctcgctctgtcacagaggctagagtgcagtgatgtgatctaggctcactgcagctttgacctcctgggctcaagtgatcctcccacctcagcctcctgagtagctgggactacaagcacgccaccacctaggctaatttttgtatttttttttgttagagacagggtttcaccatgttgcccaggctggtctcaaactcctgggctcaagcgatccatctgccttggcctcccaaagtgctgagattacaggcgtgagccactgcgcccagccaatattttttaaaaattggaaatcccttgtaataagccaagtgttgggggaagaaaagcaataaaagcaatgacatggactcaatatgaaacatccaaagcatttgacatgcctttaaaataaaaaaatcagtactcacctcgtgctcatttcaaactgtggatttccttggtctaaaattttaaaaaacaaaaaacagcactctcaaatttaagctaatttgaattgattttacatagtgatttttaaatacacatatatgcataaagagaatactataaaaatatataaaggtgtgtaggtcttgatcatattttcccaggaattcagaaaacgctgctacagtccctgggctcacgtggtcctggcatcctccccaacgtctctaccccatcctgctgagtttctggcatgcattggttctgggtctgtccaagtttctactgttagctccattaatactgaattaaggaataaacagtgctcaaatgctcattttttccatgtgagcccaaattatgtgacttgatgagggaaaaaatcatgagtccctgggagagcgataagaatcacattctttactaaagtgttgtcccaggtatgagaataacaccagatctcaacctccagaggccccccactgcctcccacagcataaaagccaaattcctcggcccgatatttgaggccatctcaatctttttcctttcaccctatacctgactctcccaggctaggctcagatcgtcactgaatgtgctcacttcgaggcacctctgtgattttcaaggttcctgggcccaccttttactaccgatgtgactgccacatgttgcccagttgctaggatgggaccgtggccttgatttctgccgggactgaggctttgccttgtttcccacccaccctgctgcctgcccctgcactcttctggctggggcctgatctttccccgcagtctcccttcacctctagatcacaggcagtcatgccacagctgaggagcttgtcccaaacctcagtgcctgcctccctcctcggcttcttgtgctgctgtgtctcacccatcagtgaygctcttctcttccctgcccaagccctagctgactccataacacctggatacaatgtcctcttctgtctggttacctccgagaggccctctctctacatccctcattggctcccagtgtcattcctctcacccatggccctaaggtcactgtattctttggccagtgtacagggttattatgcttaacaatccacaaaggttgaaaggtgttgtaggatggtgtaaaaatgaatctgggtggtaatgtttatatgtcagagctttgtaaagtgctcggcaggcgtaaggtactgacagtcctgatattcctgatcttggaacctgggacaccatcttctcaacattgcccggataccctcaagggtatccagacagcctgagtttgcattctgttcctggttcagcccagggccctggttcccgctcactcaccatccactgtgggccctctctaaattcttaaagcccttgccatttgcatcactcacagagacatttcatcagagcctacttggtgcaccaggctcaggagactcagttctgctgcggataagttatgtaaaattgaccctctgcttgcacatctgtaaaaggaaggggctggcacaacacctctgggcctttcagttcagtagtgttttctttttatctaaaccacgtgctgggtcctggttttgcttcttatctagatttttgcattcctgtcacaacctataaagcacagttcaggccttaaggagggcttgagaaatctctttccgaattgtcaactgaataagtgtcatatcttcataacaaacttgtctttttttgcagggccaggaaggcagcaggggagtcagttaaaatataaattttagattaagcttaatattgttaagaagtcaattctcaccaaattgttctagagattttacataatcctaatcaaaatctcaataaggttttttgagaagttggcaagcagattctaaaatatatatagaagtataaaggacacagaataatcaaaacaactttaaaaaggaagaacaaaattataggactctaactacctcattttaagacttattagaaagcagcagtaaccaagatagtgagggactgatgtcaaggtagacaaatagatcaatggaaaagaatcaggcatccagaaatagatgcacttacataaatcatcaattggagaaagaatagtgtttttaacaactggcaatggaaaaactagaacatcagtatgcaaaggactgaactttgatccatacctcacaccacatacaaatcaaaaacagaaacaaacaaacaaacaaacaaatactcaaaatggatcagagacctaaatgtaaaactataaaacttctggaagaaaacacagggagaaaatctttatggcttttagataacgatttcttaggcaggataccgaaaacatgatacatacagtttttaaaattaaatattataagaattaaagtcttttgctcttcaaaagtcactcttaagagaaaaagatgccacacactagaagaaaatatttacaaagcattaaaaggacatatatctaggatatacataaaaactctcaaaagtcaataataagaaaacaatgagcaaaagatttgaacagacacttcaccaaagaagagataaagatggcaaagaagcacataaagagatgctcaaccattagttactagggaaaagcaaattaaaacctaatgacataccactatgcccctattagaaatctgaaaatttaaaagactgacaataccaagtattggtgaggacatggcacaagtggaactctcatacattactatgggaatggaagatactataatcactttggaaactatttagaaatttcctaaaaaattaaacatacacctaccatatggcctaaccattacactcttaggtatttacccaagagaaatgaaaacacatgtccacacaaagacttgtacttgcatgttcatagcagcattattcaaaatagccccaaagcagaaacaaatcggatgttcattaacaagtaaatggataaagaaaacggggtctagccaaacaatgaaatactactcagcaacaaccaaaatatgtactattgtttacaaaatccaaatagatgaatctcagaataattatgcagaggagagaagccagaccaaaaaaaaaagtacatagtgtattatctcttatgaaattctagaaaatgcaaactaacctatagtgacagaaaggagattggtggtcacctggggtgggtgagggaggggcaggagaaagggaatgcaaagcagtgtgaacaaacctttggcggtgataggcatgttcattatccttactgtggtgatgccttacagatgtatacagatgtcaaaacttatcagattgtacactttaaatatgtgtggtttatcgtgtcattatacctcagtaaaggagttttaaaaattgtagtaaaaggtctctacctagaaaccttaataagctaaaatgtatgtccccaggactaaccctagctattctatagttctggggtggaacctagaaatctgcatttgtagcaagcccttcaaataatttgaatgcaggtggtccttaaaccaccctttgagaaacactgacctagtgagtaaggatttctaaacaagcttgtgactagaatgttgtttctgcagggaacaagtgactttttctactagagttgccatatcattctgtgttaagcctctaggacactcctactcaattaccatgacatatatttaacataatattaatagttgtaaaacaaaagtaaaccatagtttttttcccatcttatctgtatacaaagtaaaatcaatgacataatattgttactagttcctggcagttacctacagtttaaatcaagaacttatgttgcttggtttttgtgacagaaaactgatgtggtggctttccagttacactgcttggtttaccttttcccttatcttatgatgcacacccagctttgcacgttcctgagcagctgatgatcatagaagacctagaaaaagtgtgagccagttgcattcctgctatctctaaagaaaaaagttatcttttcatttttatgtgatttttcttacccaaaatgcaaaccactgccagtataaatgatggaagatagactttccacatgaaactggcatttcttcaccctagtaacattacctgaggggaaggtcagaactcaattgataaagctcgctgtggattttcccaccaaatatccctgcaaacaaagtgaaaggataaagcctgcttaaagatgatttgtaattgttgaaaggagtacagtgtgtgacatcagtgaaaatggtggagaaaaaacccgtccccaaattctcttctttgtgaaagcatggaaaaaactggccaaaaatggttagaaaatttattttcagaatatcgaaatttttttttccttttttttttttttattatactttaagttctagggtacgtgtgcacaacatgcaggtttgttacatatgtatacatgtgccatgttggtgtgctgcacccattaactcatcatttgcattatgtatatcccctaatgctatctatcccttccccctccccccaccccaccacaggccctggtgtgtgatgttccctaccctgtgaccaagtgttctcattgttcagttcccacctatgagtgagaacacacggtgtttggttttctgtccttgcgatagtttgctcagaatgatggtttccagcttcaccatgtccctacaaaggacatgaactcattgttttttatggctgcatagtattccatggtgtatatgtgccacattttcttaatccagtctatcattgatggacatttgggttggttccaagtctttgctattgtgaatagtgctgcaataaacatacgtgtgcatgtatctttatagcagcatgatttataatcctttgggtatatacccagtaatgggatggctgggtcaaacgatatttgtagttctagatctttgaggaatcgccacactgtcttccacaatggttgaactaatttacagtcccaccaacagtgtaaaagtgttcctatttctccacatcctctccagcacctgttgtttcctgactttttaaagattgcctttctaactggtgtgagatgttatctcattgtggttttgatttgcatttctctgatggccagtgatgatgagcattttttcatgtgtctgttggctgcataaatgtcttcttttgagaagtgaccgttcatatcttttgcccactttttgatggggttgatttttttcttgtaaatttgtttaagttctttgtagattctggatattagccctttgtcagatgggtagattgtaaacattttctcccattctgtaagttgcctgttcactctgatggtagtttcttttgctgcgcagaaactctttagtttaattagatcccacttgtcaattttggcttttgttgccattgcttttggtgttttagtcatgaagtccttgcccatgcctatggcctgaatggtattgcctaggttttcttctagggtttttatggttttaggtctaacatttaagtctttaatccatcttgaattcatttttgtataaggtgtaaggaagggatccagtttcagctttctacatatggctagccagttttcccagcactatttattaaatagggaatcctttccctatttcttgtttttgtcaggtttgtcaaagatcagatggttgtagatgtatgatattatttctgagggctctgttctgttccattggtctatatctctgtttttggtaccagtaccatgctgttttgattactgtagccttgtagtatagtttgaagtcaggtagcgtgatgcctccagctttgttcttttggcttaggattatcttgacaatgcaagctcttttttggttccatatgaactttaaagtagtttttttccaattctgtgaagaaagtcattggtagcttgatggggatggcattgaatctataaattaccttgggcagtatggccattttcacgatattgattcttcctatccatgagcatggaatgttcttccattggtttgtgtcctcttttattttgttgagcagtggtttgtagttctccttgaagaggtccttcacatcccttgtaagttggattcctaggtattttattctctttgaagcaattgtgaatgggagttcactcatgatttggctctctgtttgtctgttattggtgtataggaatgcttgtaatttttgcacattgattttgtatactgagactttgctgaagttgcttatcagcttaaggagattttgggctgagacgatggggttttctaaatatacaatcatgtcatctgcaatttgacaatttgactttctcttttcctaattcaataccctttatttctttctcctgcctgattgccctggccagaacttccaacactatgttgagtaggagtggtgagagagggcatccctgtcttctgccaggtttcaaagggaatacttccagtttttgcccattcagtatgatattggctgtgggtttgtcataaatagttctcattattttgagatacgtcccatcaatacctagtttattgagagtttttagcatgaagggctgttgaattttgttgaagacctttactgcatctattgagataatcatgtggtttttgtcttcggagaacactggaaattaaatgatggcttgcagcaatctggagagcatttattcaaggaaaatggctgtgtctcagtatgactaatgagctttttaacttgccctatttctatcctccccttccttggtggtagccttagaaatgaacagcctgcaatgatagtgaaaatcagcagtctggcagccatgggaggggcagaacaggaatgggggaactatggagcctcattcttagagaattatcattatttgatctgtccacgggtttctaggaatacctgacctgcaagtctgtctttattaggcctgactcagaacttgcccaatgtgaaaagtcttttccccaaaggcctttgtagaaaatgattacaggcaattgtttaacttcttggttgctcgaggtattggctaacagtggggcaaacatgggctaatcagaaggtttaaaatgaaatgctcaggaataagatgctcatagagggttgtaaaggctccaaaatatttatgagactctagaagaccatgcacacatttcctgtgaacatgttcaggacagatctgcgaaggccccacgatcttacctctggctgatcttgatgatctgcacaaacagaaagtgaaagctaggctagaactgtcaagtgccaggctgagtgtgaaggtgtgccctaatgtgcacacagagccccttggcaaagactagaagacttactgctttcaggtgtttaaagaaatctctgtcatgtcattagtatttagatcactaagctaactgaacagaggcttcaatggctgcacataaatacagacttcacagaattagtttagaaaagtcactataacaaacaacaataaacagcaacaccaacaaacagtagaggtgggaaggtccaatttccagagttgctacattatgttatttaaaatgtgcaattttaacagaaaataatgagacatgtaaagaaataagaaaatgcagtccatacccagggaaaaagaaaaaccagtcaatacaaactgttcctaggccaggtgcagtggctcatgcctgtaatcccagcactttgggaggccaaggcaggcagatcaccagaggtcaggagtttgagaccagcctgaccaacatgttgaaaccccatctctactaaaagaaaaatacaaatttagccaggcatggtggcgtgcacctgtaatcccagctactcgggaggctgaggcagaagaattgcttgaacccaggaggcggaggttgcagtgagctgagatcatgccattgcactccagcctgggctacagagcaagactctgtctcaaaaaagaaaaaaaaagaaaaaagaaaaaactgttcctgaggaagccaagatactgactttactagaccaatactttaactatttttacatgttcaaaaagttaaaggaaatcatatataaagactaaaggaaagcacaagaacaaatcctcattaaatagaaaatataaagatttgttttaaaggacgaaacagaaattctagatttcaaaagtataataattgaatgagaaattcactagagtggctggctcaatagcagatctgagcaggcagaagaaagaattagagaactcagaaataggtcaattgaatctatccagtctgaggaagagaaagaaagaggaatgaaggaaaaatgaatagagcctcagagactgtgagataccttcaagcacgctaatgacgcataatggcagtctcagaaggagagagggataaatgggctaaaataatatttaaagaagcaatggctgaacatttcccaaatctgatgaaaacattaatctataccttcaagaaagtctataaactccaagaaatataaattcaaagagatcaagatccacacctagagataacataatcaaactgtcaacaaagacaatgaaattatcttgaaagcagcaagcacatagaaggactcttcaataagattaacagctgatttctatcagaaatcacagagttgagaaggcaatgggatgacatattcaaagtgcttaaagaaaaagagggtcaacaaggaattctatacctaaagccaatttatcttcaacaaagatgccaagaccattcaaagyggggaaagaatagtcttttcaatcaatggttctaggacaatggatatccacatgtaaaaaaaggaacttgggcccctaattcacatcatatacaaaaattaactcggaatgagtcaaaggcttaactgtaagagttaaaactataaactctttgcaaagaacactatcaagagagtaaaaagacaatgcacagtatgggaaaaaatacttgcaaataatatatctgataaaagtccagtatccagaatatataaataactcttacaattcaaccataaaatgacaagccaattaaaaaacatacaaatgagttaactgacatttctacaaagaagatataccaatggccaatatgcatgttaaaagatgctcaacatcactagccatgagggaaatgtaaatcaaaatcacaatgagatactagtacatgcccactaggatggcaatgataataataataataataataatgttattataatgaacaatacaagtgttagtaaggaaatggagaaaattgaacccaactattatattgctggtgtgaatgtgaaatggtggtactgttttgaaagatgatttggaagttcctcagaaagttaacaaaagttaccatatggtctggcaattctacatatatacaccaaagaaaactggaaataaagattcatacaaaaatctgtacaaaaatatctacagcagctttacttacagtatccaaaaaggggaaaaamcccaaatcttcatcaactaatgaatggataaacaaagatggtatatccatacaatggactgttactcagccataaaaaggtatgaagtactgatagatactacaacataaatgaaacttaaaaaaatacgcaaagtgaaagaagctagacagaaagggccatatatgtgatgtgtagagaaaacatccaatagagacaggaaatacattagtgattgccaggggctgggtaaaggtgagagatggagaatgattgctaattggtacagaatttttttgttgggagagttatgaaaatattttggaagtataattagaattaggctgttaaatactttaaaacaaaaaacagctgggcgcagtggctcacacctgtaatcccagcactttgggaggccgaggcaggcagatcataaggtcaggagatcaagaccatcctgcccaacatggtgacaccctgtctctactacaaacacacaaattagccaggcgtgttggcgcgcctgtagtcccagctattcgggaggctgaggcaggagaatcacttgaacctgggaggcagaggttgcagtgagcccagatggtgccactgcactccagcctgggcgacaagagcaaaaactccatctcaaaacaaaacaaaacaaaaaacaaaagtaagaagtaaaaaaatagaattagactggggatggttattgagccttgtgaataatctaaaacccactgaattgtatattttagacagtgaatttgatggcatgttaattatatcttgatgttttaaaaaaagtagtacagtgtctgaaaggtagcattggccatttgaatctctgttaacattttcttgggtggccatcagatttttgattaaaggtgaccttggcaattaagtggtggggggaacacaaccaaaagggacaaaccaacacaaccacacacaatcacacaacccctccacctccaccacagtggaaatcaagcataggtgcttccagggactgtgaaaatgtggccacagttgttttcccagcaaaccattttctttcacaatatccccaatttgcacatcccccactgagctgaaatcagtataactcgacagacraaagtcagcaggggtaacctacctttgatattattttgttgttccatcaataatttacttatttctgaaaaccaacagtctctgatttcttttgaagctgcctgcaatcacacataagaaaacactataagactaccatgagtattaattgcagagtttttattctcccagtgaccgttagactaatgagatagaaaacacttgtcaagtcatgggaacacaataaggaaagagtagaggagacccatggggaaggcatgagcgttacctgcaggatgtatttctcaagtccatttcgactggcaatctcaaactttctatggctcccccttccaagctggcgaattgaaagtgtcatcagctattataaagagggaagagaaatgttctataccatcgttttctgattttaaaatagtccctgtcaatcactctaatcctttctatccttgacagctctcttctttcatcttcctttcaagtttttgctttcctctcttaatgactccaagacagcataaaacacaatctggtacagtgtcttctgtctcatctgtttcagaaggtaacacagactgttaactttctactgtatctttatgcaggaggcgctgcagccctcaacctttcagtgaagagatcatttctccttcaacrtgtattttacaactttctacgtaatagtaactgaataaggatctattcagaaacataaataacaaggccaggtatggtggctcatgcctctgtaatcagtcctgtaattccagcactttgggaggcctaggtgggcggatcacctgaggtcaggagttcgagaccagcctgaccaacatggtgaaaccctgtctctactaaaaatacaaaattagctgggcatgctggtgcgtgcctgtaatcccagctacctgggaggctgaggcagaattgcttgaacccgggaggtggaggttgcagttagccaagatcatgccattgcactccagcctgggcaacaagagcaaaactctgtcgaaagaaaagaaagaaagaaagacaagaaagaaagacagaaagaaagaaaggaaggaaggaaggaaggaaggaaggaaggaaggaaggaaggaaggaaggaaggaagggagggagggagggaggaaggaagggagggaggaaggaaggaaggaaggggagaaagaaaacaaaggctactatgaacaaattaacagctttaatcacaasagcataaatatatatgggtgtggctcctgtatgtgggtgtgtgtgtttcatagcctgagagctaactggctatgaaacagtttctaaacaggtgagaaaacaatgcttggtgtgggcctgggtgccttagaccccaaggtcaggacaatgcctgcacttagacacaaagatacaccgttgagaaggrcaagtctaagatgaaatccagcccatgttctcatcactaagtctttcaactctcttttacctctttgcctggaagaaagagggtacttttactaattagtttgtccagactggctgccatatagtcttttttctctagtacaaaggcactcctatgccagccctggcccataagctctgaccctggagtcagacagacccggctatggattctagccctgtggtgtggtatttggcaagttaacttcacctctctacactgcagcttcctcatctgtaaaataaggaaaacgatctctctcttttctgcatagggcgactcccagatgcaataggactccctttaccttcatggycttcttgaagctgtaatgaggagataatccctggtccccaggctccattcgtatcttacagaacactattcccctttcaaataggtagatttgcctctggctgggtttaaatcgaatcaaatccttcattttataacgatccttgtgaattgtccagacgctgaaagggccgtgcagcaacagcttgcctagttttccaatatcgtccttttggaaacacacatacaggaaaagaagctgtaaaattacttgacagagaaagaagcctttgtggcctgttttcaaattttataaagcatgcttctttgaggtttacaattctaaaagtgctattcaggctggtctgtcactaaatcaaaacgacaattttttgagcttcactgagcgtggtgccrtttagttatataaggaaatcaattcagctatgaaaggtaatgctatacataaagaatgttagaaatgcttgagctagagatacggggactgtgatatttttgactcaattttaactagcagaattcaatttcctctgtgctatgtttgatacatgacagtctccttcaaagggacaagaaattaacatttcaattatgtccagtagagatagaattttggctgcattgyggacccatgagcatctgtgtgttccatctgcatcctaacttctgcttcaggtatatgaggacctgagaaaatgaagcttgttctgaaaagagaaagtttactgtgatctaatcttcacaacattgtaatggaaatagtaactgcattcaactctgagtttttcagagtgagtcaacagtgccaagataataccaaatgacagatttttaagaagtctgtttgactctaggcataaactgtgatgcccctgtctccaccagcaaggctgcctttgtcatatgtctggttgaaagtccaaatgagatgaccctgccttctctgagctctcttcaaaagacagtggaccaagatgagctgggagcgaggcattttatctggtatttttcaaaacttcgattgcttaaagcagataagaattcatttccctgaataaaaacaccaaaaggaacaaattatttgaaggggaccaagacaaagaaatctccctaagtgacctctagctgagatcaatccctatgatttctgagttaatactggaaatatgtacttcattcataattgattgggcatttttataakttattgtttatatgttgggcaaactctaggtatcttttttaaaaaggaattgactttacttctgaaacattaaaagaaaaacttcaagagcaataaactctagtcatttctatggtgtctatggcgttatttcctatgttaattttctattttcttctttggaaaatttacatatgtagactgtggtgaataaaaccctcaaactcccagccacgaggccttctttcctaaaagccaatgctcctgttctgtgttaacagttcaccacattccaaaacagaagggtggataggtccatgaggaccctggagaattttttcactctatctgcatccatcaaggacccactcaaatgtaatcactacagaccttagtgactgctttttcctttaaatccattcaattcataatcaatatcgacataaatagtgcaggaaatatgttttagtaaaggcaactggtagaagtagatacttaatatttgccacataaacaaatgttatcagcacaggttgagcatccataatttaaaaaatctgaaatcctccaaaatctggaactttctgagaaccagtatgacactggaggtgaaaaattccatacctgaccacatgtgatgggtggcagtcaaaacacagtcaaaattttgcttcaygcacaaaattattttttattttttatttttttgagacggagtcttactctgttgccaaggctgcagtagagtggcacgaccttggctcaccgcaacctctgtctcctgagttcaagggactctcctgcctcatcctcccgagtagcttggattacaggcgtgcattaccatgcccggctaatttttgtatttttagtagagccagggtttcagcatgttggccaggctggtctcgaactcctgacctctggtgatctgcccacctcagcctcccaaagtgctgggattacaggcataagccactgctcccggccttcatgcactaaattatttaaaatatgtaaaattaccttcagtctatgtgtataaggtgtcatgaaacataaatgaatttcgtgtttacacttgggttccatctgcaacataactcagtacgtatgcaaatactccaatcctcccctaaaaaaaaaaaaactccaaaacacttttggcctcaagcattttggctaagggatattcaaacttgtagtttctatcttacaatgtattcactctctacctcattttaaacattcgacgcatcttacagaaatatatacagtatagacagatagaaaataaccgagggaattaaggtgaagaaaaaataaagaagttgggagcttggcgcctgcctgtagtcgcaactacttgggaggctgaggcaggaggatcacttgagtccaggagtttgaggccagcctgggcaacatagggagatcaccatccctaaatataaagacaataaatcagatgaactgttccagaaggtgtagaagataaaagaaaagatgaagaggttatatgtaaaatgcatataataaagccatktaaacttgatgtaaacttggctctgactttctaatagcaatacagagggaaacatggtgagtggtacgatttattatgtctgaagacatacacaaaccggttgttcaggaaaagcacagctattcctactaagacataagaaacatttctcccagtgatatgttgtcactgagcaacatcctcaaccacgccctatgatagaaagaggaacatgttttaggtaaagctgcttgtaagaacacatttggtcagtgtggaggctcagctgtcaaagtaattctagaagaggctaggatgataggggaagggggaataagtcgaggtgtacactctctaatgacttgtgaagatggggtgacgtgagttaaggcatccacaaggctattgtagaggaaacagccccaaccagaaatgctgaagaggcagcctcaggcagcaaggtttgtgctttattacctctgaactttcctcatcaccccatccacagccatgctgctgcaccttcataggcaagtaatcagaggatgtgaatccagagaggtaccagcagctgaccatagggcccccagcataaaaacaatgtgccagggktgggggttggcaatgtgatctctccctgaactgaagaaaacaggaggaagtgrtgaccagcaggagayggggctgtgagatgctttaggggaaagcaggcagtggaataaacgagaaggaaacagaactatgaagaaggtgagtcattagaaattatgaggaagaggaagaaactgacggaagggaaaaaaacagtcagtaggtggtaagagsrggggcgagcaggcatgtgggtgcacttgacatatacaggcgggtcacacaggtaagaaccccggctccctccccaggcccaggccccagaggtgctgtggatcctgggtttgctcagttcccatctccgcgaacttggctttgccatcgtgacttcttgagaagctgcaggtcagctttccagtaagcccattattactggaagtgactcggggggagtcgctgggtctttcaagtctggcagaaacatatgggcacatatcctctgggtcatgttgcacaaatgttctcaggaccacacatatgacggtattgcccatctccacgcccaaggtccgatctccagcgggtgagcacatgccctacacggtgctgaccaagggcaggcacacacactgttcactgtgctgtgtggagctgctccgcctccaacaggaagctgcagggacattccctgagcaggagcaagaatgaccttttccgtcacgtgtaccttttctttccaactagactgtagttgatctcaaggtcggagaccacgttgcacaacctctttcagatacgtgttcaccagtatttatttatttattggcattccctagtatttatttatttattggcatttagtggtgcttgggagtaggggacaggaaacaaaatactcatcactgtgagggaatattgatttatccaaggagttcattcagcgacgcccctgtactgggttgaatagtgttcccccaaaaactcatgtctatgagaccctcaaaatatgatcttattcggaaagagggtctttgcagatacaattggttaagatggggttgccctgggttaggatgggtccaaatccaatgactggtatccttataaaaaaagaaaacaaagaaatggagacgcacgctgagggaacagccatgcaaaggcagaggcagaaattggagtggcacagctgtcagccaaggaactccaagaattgccggcagtcaccagaagctcagacgaggtaaggaaggattcttcctgagagccctcagagggaacgtgggcctgctctcaccttgcctttggacgtctagccktcaaaactgtgagggaataaatttctgttgttttaagtcacgtactttgtggttccttgcgacatcagccctaggaaacgaatatacttccaactgttttccaccagtaacaaagaagtgtggccatgtcacacggtgtgtggaagaacctgatggttgtgaactcagagatggaacatagcggctacctcaaatgagcgagcgataagttagatggcctcctctgtacaagaagtgatagcaaaatcaattagtaaatgctaccactttcacacctgggcattctgcaggtaagagccccgatacaaggatttcaaatgtgactacattggccaaatgaagagtctggctgagagagtgaatctagggaagctggcctcagcaagagcttcttttgggtgcccgtgtttccattccaggtagtaagagttaatatgactgtcacaaacttactgcacaaagaagcaggaaacatctgtataaatgcgtccacacagagcctgagtccagaaatgaaaagcagaagctgtgggagcctgtgattacaatagtcaggggcaaagaggtatcttcctttccagcttgagcaggtccccatataacgtaccactagggctgtttattcggcatctgttgggcgccaggcacagtgcttggtgccttacccatcatttaattctcacttactcccggcaaccgcctgtaatataggtattgtgggggggtggggggggtgggggggtggggaatgaagaagatactttgcctgggtcactaggattatttacttagccctatctctgcagctaacactgtggtaaggaaagaggaaactgaaatagaaataaaatcctggccctagctcacaatgaacttacaatacaagtacatcctttagtggtttatataaatttgttccaaaaaggaagactgtttcattcaatctttacaagtcaactttggaacttatccctggcaagtcagaatttaaatgcatctctaatatgcattggatttgaaaaaaaaaaaaacttttgttttttttttgcaaatagatagaagtaaattataactcagtgttccacaaaacaaacttgtttggaaaagaattttaaacttctgtgattaaattagacccaggactaattgagtacacagaaaaacaagaaaatataaatatcagaagggatttttttctagttgctttctagttgtttaattgtgataatttaattatcacattcaatttctttcctttataaaaccaggttaatattaaatttcaagcagagaaactaagaggttaaactggactcagccatgcatatagctgtaatttattacaggtgatcataaacacctgtaataaaactctacaaaatggagacaaagaatctcagaatcatttgagctgagttagaggcagttgtcagtcaattctaatcagaaacagataaagagtggaatagcaccctgatagggaatgaacaagaaatagtccaaggtgacagccatgtaatcttgagtgagttaactcttctttccatggatcttcttttgaatcagaaggttgaaaatnccaatatctactcctncataattcaacaggattatacaaaactgtcaggagaaattagctgatgtattagatgtaaaagtaagttaagtcttagtagaaaaggtaccaaaaagcatctggcagaggcacaattctgaggacacatggtcaaaaaaggtcctttgctttttgcgtgtaaaatctccaaattctgtaagctggttcatcctatttgcatgcaaactggctgggaatgaaattagggcagratgttatttgctcatgttttaaccattcttttctcacagcctcctcctcctatgttatttacactgtttcctgccctgtgtattgtttccaggacattcattagattcagggaaatgaaatttaatagggatgtctaatacgtaattcaagatttaaaaaggaacagaaagatgccctggattgacctaacaaattgttcccttgactttcctcagscgaagaaagaagaattattaccaagaaaatgatccttatacacaccctaaccctactctgcagtttatgcatatcctcttgaatcatgcatcagttgtcatcagagacaccttggagtcccaggggacagtaacagcatcatggctgggatcacagcaaaccccatggggctaagtttctgagatccaggcccaagaaataccagcgtgggaagtaaaaataactcatttttcggaccttaataactttcatggtttgatttatgacaaggaaagaaaagtcatttcctctaccaagacctcaatacatggtatgttcaaaaccaaataaaaatgaaaagaaaaaaaaagagaaggaaaaagtataatataatcacaagtgacaaaaacgcagaagagggggtcacagagatgtgatgtaagaaaaacttggccgggcacgatggctctcacctgtaatcccagcactttgggaggcggagatgggtggatcacgaggtcaggagttcgagaccagcctgaccaacatggagaagccccgtctctactaaaaatacaaaaaaaaaaaaaaattagcaaggtgtggtggcaagtgcctgtagtcccagctactcaggaggctgggacaggagaatcgcttgaacctggcgggcagaggttgcagtgagctgagatcatgccattacactccagcctgggcgacagagcaagactctgtctcaaaaacaaacaaacaaaaagaagaagaacccaacctgccattgctggtttgtgctttattacctctgctcatagaagccatgagccatggagcgtgggtggcctttttaagctggaaaattccaggagacagatgctagactccaaaaaggaaaggaaacaccttgattttagcccatgagactgtgttgaacttctgaccttggaacttcaaaataataataataatgaatttgtgctgctctaagccaccaagcttatggtaatttattatgacagtgaaataaaacaaacacatctgaataaaaatctagagtacttcaaagtaaaaaacaaaacaagtcgaatattaactatgctccagtctcaaagagatcatacagttataggggatgttttgcctggaatgcctgggaccagcctgctccggattaacactgacgctggagctcaactccccagcattggcctctaactgcatctcttgggttttctttagactatttggattaatgcatgtacactatatacttttggggcctcttctgggatctgtgatataaaattggggcaagaatataggacctgtttccaaaatacttttcttagagaaactctgaaacaagaagacaaatcttttactattttaatagtgccatgagttagaaaataaattgctcctccaggacttttcctctgcccatatatgttctggcccttgactttctggtttgtccagacagtgggtcagtcccacattcagaaccctgaggaataaatycaagattcctgaagatgccaagggacagcttggaatcttgtagtgcgggtttactgagcaatttaggcgactgtcctcagagtccaattcctttaccatagacgatctctctgactttgccagagcatttcctcactgtgtagtattgcacctgccttttgtgtgagatgctctaacactactatggaacataccggacattcagtcactgctgctaggtccacagccaactcacaggacttgatcaaatcctctatcactgccaaagcttgttgtagttcagttgagaatgctgaatctttggttctctttggcccatcctgtggaaaacaaatgccttgttggaaatcaaaagtataccatctgcaaagtgaagaaggaaaacaggacagagatgaggagccagggatccagccaaccctgactgagaagggtggatattgatctgtctccctgctcccaaagcatggtggctaaagatgcttactgatttaggtatacggcatagagacaagcaaaatcatctacctctgtgcattgtactagtgacgaatgaagttcataaatcatggaaattatattcctgctacataagaaacatatagaattcagctatatagctgaattctatatgtttcttatgtgtatatatattatataaatatttatatagtatattaaatatttatatattaatatataattatatgtttatatattaattatatatattaaatatttatatattatatattatataaaatataagtatatatattatatatatatatatatatatatatatattttttttttttttttttttttttttttttttttttgagagcgagagagagtttcactctgtcacccaggctggagtgcagaggcacgatctcggctcgctgcaacctctgcctcctggattcaagcaattctcctgtctcagcctcccgagtagctgggattacaggtgtgcgccaccatgcctggctaatttttgtatttttagtagagacggagtttcgccatgttgaccaggctgttctcaaactcctaacctcaggtgatccacccaccttggcctcctaaagtgctgggattacaggcgtaagccactgtgcctggccagaatttagcttttttaaagcatggaaaaacctagctccttttaaataggcttctctctcttttatacccctattccctggggcttactgaaaaaaaaaataccatatggccgggcgggtggctcatgcctgtaatcccagcactttgggaggctgagacaggcagagcacttgaggtcaggagtttgagcccagcctggctaacatggtgaaaccccgtctctactaaaaatacaaaaattagcttagtgtggtggtgggcgcctgtaatcccagctacttgggaggttgaggcaggagaacagcttgaacccaggaggcggaggttgcagtgagcccagattgtgtcattgcactccagcctgggtaacaagagtgaaaccccgtctcaaaaaaaaaaaaaaaaaaaaaaaaaaaagtagctgggtgtggtggtgtgtgcctgtaatcccagctactcaggaggctgaggcaggaggattgcttgaacacgggaggtggagtttgcagtgagccaagattgcgccactgcactccagcctgggcaacaaagtgagaccttgtctcacaaaaaaagaaaaaagaaaaagaaaaagaatacaatctgagtatcatattcctatatttaatgtggaagccttattcctgtgggaaaaattatacttaaaatcatcccagaggaggacatttgtaaactcctatagagacaaagaactccatagaggctgctaagtggaaatttactaatgatttacatgtaaaagctataacatcatatttccacactgaatctcccccaactctgtccttccttcctccacttgtccctggccctccccacattgcaccaccattaaagatgccaaagagataagccagcgctctgcacctcccgaacataaagactcagcattcagcrgaaaagcagtaactaattaaagagaccaatgttccaattacaaccacagtgacatttaggatgtgattggggtgattgtttcagctctaaaggcttttgcatgggcttgaggtattttatctccctgctacctacatgctgtatttatctgttacctggtaaatacacataaaaaaattttggtttattcaatgtatttttttaacatctcaagttctgcagtgaagaacagctagcccctttgctgctccgcatctggccctgactctttttgtcctctacagcacaatgtagtcacagggtttaatattttcttaatctatgcggaagcactgggtatttgcatctttggatgagagacatgagtgacagggctgatgaatggaatagatcgtgctgctgcctctgaaaaacgtatcatggattcgtagcttctcattcataataaagaagcttcgcttcctggtaaaagaaaacagactctcacctgaatttattttaacaacatcaataagggattaagagttcttggcagggcgcagtggctcacgcctgtaatcccagcactttgggaggccgagggggggagtggatcacgaggtcacgagatcgagaccagcctgaccaacgtggtgaaaccccatctctactaaaaacaaaaattagccgggcgtggtggcgggtgcctgtaatcccagctactcaggaggctgaggcaggataatagcttgaacccgggaggcggagttgcagtgagccgaaactgcgccattgcactccagtctgggtgacagagcgagactctgtctcaaaaaaataaaaaaataagaaataatttttttttaaagttcttataccaggcatcttcctccttaccaaacactgaatgctcagtttcctttcagatcctcacctcttcccatcccccttccttccgctaaccctccttcacaaaacacgaggtggctagggttttgaactgtataatgtagggttcagaaaaatcctttaaaacattattaaactcctctaactagggctagctcctcttgctccaggctgtaaaaatatgacctgtgtcctgagctgcttctgttttcaacaggtccttgtcatccattctgagcagaaagggcatgcaaatgactgccccataagacatgtctcaagtgtttcttgctaaaaccagaatattctataggaaagggaagagaaaccgcactgctatamcacagatttcttcctaacctggtgtggtcatggtcaccatttattctaagggaactttggcagactcttagagttcacacacacgcacacacacacacagaggagaacaaggcataacatatagaaattagatatactaagaggtacaaagaagaaaacataatcctaccattcaggaaagccacagcagacattttatcatatctatttacttccagtcttttatgtatgcattttacgtatttgcttaattttgttcccattaaaatttttttggctgggtgcagtggctcacgcctgtaataccagcactttgggaggccgaggcaggtggatcatctgaggtcaggagttcaagaccagcctggccaacatggcgaaaccccgtctctactaaaaataaaaaaattagctgtgcatggtggcgggcacctgtaatcccagctacttgggaggctgaggcaggagaatcgcttgaacccgggaggcagaggttgcagtgagccaagattgcaccattgcactccagcctgtgcaatggagtgagactttgtctaaaaaaaaaaaaattatgtggaaggaagaaaatatattaccacttccatttgggctgcaaatccctactttaaaattgcctttaatttttttgttttttttcttgactgtgagttataggatacatactattttagaaaatctagataataaagaccaccaartaaaattgctataaatcctccgamccatagacaaacaccattaatagttagttatataaaatgtaatatttaatattgagtaccttagccgagcctcctagttcacctgggtctatctccatatcttcaggagactcgaratccagcagaccctgcattaacccaaaagtcttgttgaaaattaaaatgtacattgccatcaaaatgtagattgtcaacaaaatctactgtgcaaactatctgccaccaatgctaagctgactgagaacgtgtgtaaatgtgtaagagggaaagaataaatgatgtatttggcacagggtcctttccacaaacctagaatcatattgtacacactattttgtagactactttttctcattcaaccatacctcatgaatattttcccatgatattatgtttttctaaaatatgggctttgattgtggtagagtgttatatcttacagataaaccatttttctcattcagcaatatctcatgaatattttcccatgatattatgtttttctaaaatatgggctttgattgtrgtagagtgttatatcttagagataaaccatttttctcattcaacaatatctcatgaatattttcccatgatattatatttttttaaaacatgggctttggttgtggtagagtgttatatcttatagataaaccataatcgaattatagtcccccttatcattaaacatttaggttcaacaatattttttactataataatgataataacttttgtgcatttttcttaaagctaaattcctagagtggaattgtaaatgttaagagttttgaggcatatttccaagttcttcagagaaggactgtcttcctgccagctgtataggaaagcctgtctcaccagcccctagcctacaaggggtagtaccatttaatcaaaaatctttaccaattgaatgaaaagagaaatcctacctcactgttgttttaatttgacttccttagataactagaggtgtagaacttttttaaaaaaacgtttgctactagtgtttattcttttgcaaattgctatgtcctttgcgcatctttttattataatttccaagagcacatgattcattaagcatactgatcatctgttacatattttgttcacattttccccaatgtttcatgagtctgtctttaatggtataagctatcactcatcaccctctccccaagatcccatgatcctttctaaagcatgaggcaatcagtccaacattcatgctctttcaagccagcacatgtgtgcgagatgcaaaataagctctgcccctggggatagagaaggtcctagataggattacaaggtygttcctttctttgcaggcacgtaatggcctgagctggtttcacaggcaccagcaagcttagctgtggggacactgctctggtctgccttgggtagctcccacggctcctcacagaccccccgcaaaatattttgtagtaattctatctcttgtttcttcagtgaaaggcagctaacaaaaccttctaagtccttttaacctgtattatctcatttaatgctcccaacaagcataccaggaaagtactattattatcttatttctataggtgagaaatctgaggctgagagaggttaagtaacttgcctgagttcacgcagcctggaagggtcagagcctggattcagacccaggttgttaaactctcgagtctgtgtttccaatgacgatgccccacagccctctgcgtctggtaccgaacctagctcctatgtaaatgtcacctctgtgggaaagctggaacctaggctgagggaggaaggaccatcactttcgtcctgctcatgcctcactgggcccagaggttggacttctacaataggaatgacagtgacaatgggacatgcagaggagcatgaggccctgagtgagtgctgggtcaaacatgctctgaggtgctgctcgctgaaagaagcagatcattatcctcatttctatggtggtgtgacagtctcaatgtctaagataacagctacacatcatgcagagcttcctgggctgtgccaagccctccgcatgtgctaatcatctgcttcataacgatcttatggaggaggttctagtaccctcattttacatagaggaaaactaaggcccaagaggkcaaggtctcataactgacaaatggcagagtacaccgaggctgaaactgctaatggaaagcttgaaaggagtaactttgaaaaaatgtttttaaaattatttttacagatgaggtcttgctatgttgcccaggctagtcttgaactcctggactgaagggatgcctcctgcctccacctcctgagtagctgctgggactacaggtgtgtgttatcatgtctggcctgaaaggggtaactttttctgaggggagactgttgggcaatgagcttaaccttcctgagcctcagtttcttcacagtccagagcatggctggtatgtctgattgtggagattaaataagaaatactgtaatcccagcactttgggaggctgaggtgggcagatcacgaggtcaggagttcaagaccagcctggccaacatggtgaaaccccgtctctactaaaaatacaaaaattagccaggcatggcggcgcgtgcctgtaatctcagctacttgggaggctgaggcaggagaattgcttgaacctgggaggcagaggttgcagtgaactgagatcgcgccattgcactccagcctaggcagagtctcactctgtctcaaaaaaaaagaaagaaagaaagaaaaaagaaatacacgtggggaagtacccagtaaacagtaggtgcttgtttttgtttttgtttttgttttttattaagaaatagtggccactgggcaagagctacctaaatgccttatagaggttaattcaacagacaacttatcgtggtggcccaaacctttctctcaagctcacacctagaaaaccagccatgataggccctcatatcctgtttggagtgtctgagaatgcttgcctgcagatgtgctagtgtcaatgacttatcactaaggaggggtaaaggtcagagagagagagagaaaaccacttaggggttcagggttcagatatagcaaagttcattctgttaggctgctctcagggtaagatcctaaatctaagaatggaggtcagtgctgcaaaaggatagaagacttcagttttgtcttctcccttccacaagttaaaatgcccataaaacagtaactttggggaaaatcacactctcgctcccaaagagctctcttcccctaagccagactccttagtgattcatgccctgagctagacattggactagtgaggccctcaggtgccctccaactctatgattctttggtcttactccacattgaagagggctgatttagagttggaggaaagaaaaagcctgcaggatagacgtatcttcagccttagaagaccaaggcacagctctacatgtgtaacgacatgggcaccacagtgcaggcgtctggtttcccaccaaggaaaagcactgtctcattgattttaccttcaacagcatctggtattttataagtctctggcttggtcctttgagatacttaaaaagagggagattgtgatccagttggcgctggcatacctttaaaagccaaatagaaacaacataaagcaaaacaaacaacacacacagaataaaagtggcagcatttaggtacaaaacacaaaattgcttttcctggacaacaggggcagctgtgtcgagcagctccataaggctgtggggttgttctttcccctaggaacagtgtgtgaaataagagaaagaggaaagaggacggctcggctaatatttttacaggcatctagggaagcagaaccatttatttcttttagaaagcaagttcactagaagacagtggggcatttcaagtccttctgaaaaagaggccacctatcttcaagttgggggctgccagagtctattcaggccttttggagcctgaaggatacagacggtttgtagacatcattccagggagcccaaagtgtgacattttttacttagtttcatttttaaaacccatcttagaagaagacactggttttctcaccagatataggtgctcctcacaggcctatcccattacaacttttcatgtgtaatttcaaagtatgggacactttaaataaacataaatcgcaatgccaagttcctctccctagtcccacttttgatttctttaacaacttgatgcatagaaacattttccaggaagaagtttgtcttctcaacattaccccaaagtaggcgcagtcttgacactcttgccagattgccctagctcggggcagattcttatggtatttaaaatatatctgaagatcttctttctaggtgggaaaaaattagaataaattaatcaggcagcatttttcagtaagtggacaggatgatacagtttattcattcattcaacaagccagagtattctaatgtgtaaggaattgggggtgtacagtaagtaatcttatgttgggatgtgtgtgtgatggagagataaacagaaggctttaaacaaccataactaccagacatagataggcacagagtgctctgggagcatctacaagggctattggtaaatacataagtagactcacaaacaggaattggtttttatctttatcattcttttcctgccctttgtccaggacatcgacatctccccacaacaggtctgcaatgagtagtaaaactgacagaaaagaggctggtgtttgatggtccccctctcttctctctccaccctctccttgtggtcatcgtgacaccaaccctgcaaagaagcccaagaaacaaccaaaagatggaaacatgccagaggggagatgtggtagatcgggcaaccaatacggagctcagtcatttgggcaaccctcaaagtgacaggctccgcctcaaacatcactttcaacctgcagcacaagactctgagacaggaaatgttatgtgactgtttcggagctagagagcaaggaggactcaacgtgctgttcaacctgtattctcatggtatcaaagacgctgagaggtgggcacatatctgccaatctcccggagagaaagcacactccaagcctctggcgtcagcttgccagcttcactcgctctatcagggagcctggcccacagcggctgtgctggccacagatcccatgccattctggtggagaagcccatgtagccacctccttgcagaagtctgtgtccctgtcctcctgctcagcccaactctggatttccttcatgtcaacacagatgattccttccctctcagcttcaatgatgcctgttctactcccaaatacattgctatagtggatgacttccatttctgtagctctttctttctcccaataggttgtaagtggtcatttcagcataggaactacagcaaccgtcctttgctattccctccaggaaaaaaatggcacacacatttaagacagatggcccttgaaaaatgttcagactggttaaggagctagaataataactcagagcttaacaatatagtattgacctaaattgctcttctaaaggctaacagtccaaaattcctcagagaaaggatgtccactaaccagcaacatacaaaagtgcccaattctcctaatctccttatagaatgaatcaggaggctataaaattgctaccagaaactcatattcacacaagaatacatacttgcttacggattaagactgcggggctctggtggcggatggtccaggttcagttcttggctttgccaaatacaaatcatatggcctaaagtaagttacctaaccttcctagacttcagtttcctcatctgttaagtgggcccataacagtagtcaactcctgtgactgttgtgagattaaatgagatgatgtatagaaacctctccacaaatgcccaatggatagagtactcaaaaaatggtggctattgtcaaagcactttttactttatggaatcctctgcatacattattttgtttcccacaacaactgtacatattggtactattagcctgttgtgtggaggaggaaagtgagattccaaagtttaagttatttactggaggtcatgcagatagcaagtggcttgaccaacatgataaatcgggtttcctgacttaccagttactcccacatatcagtgtgagcacccattccagtgctctttccattttaccatgtgagatctcagagtacttggaacccacagtacactatggacaaatattattctatatagaacatggtctctggaggagaattgtttcagaagatacaggctaaagaggctgattaaaacacttggtcagaaaactatttcaaaattcattatcttggaaggccgaggtgggcggatcacgaggtcaggagatggagaccatcctggccaacatgatgaaacctcgtctctactaaaaatacaaaaattagccgggcgtggtggcacatgcctgtaatcccagctacgagggagggtgaggcaggagaatcgcttgaatcagggagtcagaggttgcagtgagccgagatcacgccacagcactccagcctggtgacagagcgagactccgtctcaagaaaaaaaaaaaaagtactacttgtattttgtctctaacatcataaatcacatagggctaagtcagtgttttctggctgggttaatgatttacaatgttcctcccaacatggcggggcgctatcaaaaaactttgtaaaactttacaatttaggagaggaattcagaaaaggtatttagttaataattctctgacaatttcctcatatttgaacaatttgataatatccactttcccacaggaactttgcccatttctcattgagcaatttaaataatctttgcagtaatgacatacataaccataaaatacttctaatctctgaaactagatttcacattagtcgtttgttaagtgcaaaaattcaaaatagtatataaagcactaataatgtaatagttcaaaaaaattaatgaatcagaatgagtataaaatagttttcagtgtacattgaattctggtgctttgacacaaagcctatgatgagttgacatggaaagccatatggggccaccaaaaggctctgagcatggaagattccttctctccattaatgtcaaatatcttgaaacctggaggctttgtttgcttccagttatcataagtattgctctcagcctcagtcataatatgagttgcttacaactttaagttgtttgatctgttgccttgggttcacaaaaataaaaataagaaagagaatgagaaggactagttgagaaagagaggagaaatgagaactatttagaaggcacagggggtcaggatcatctccatggtcgtgtcctagaaagtacctggtggggattgatgttgggtggaacatttctctgtggcagctcccactggcccatatagcctatttgttgcctaaaacagggtggagaaacagggaaagagggaagaagtctgggaggtgggaagaaggggtagttggaggtataatgttgtaggccaagatgttcataaattgagtactaagcctaaaggaggctgtagatttagaattttcgaatcatcctctatgttgtaaaaaatagaatggaaagaaaatgtatttcctgaggtttttagtttaacaccagtgcttctcctcttgagagcattagtacagctttattgtgggactctaacctcgctgtatgattcttgttttaaaacgtagttgagtcattcagaagaggatcctctgctttggggaccatggatggccagccttccatttcatggggctttgcaggaagccaggcttgcggttactcccacatatcagtgtgagctcagtcaaattggactcattctcaccttggataaagtcagataaagttgggaggccaactcatgttttccattcaaagggcagatacaagatatactgtcttgacaaattgcaagtgtacagtacagtattattccatgatagtcgccatgctgtgcgttacatctccaggacttactcatctcataactgcaagtttgtaccctgtgaccaacatctccctacttcctctagactccagcccctggcaaccacccttctacttcaatgagctcaactgtttttggattatatatatatacatatacacacacacacacacacaatggtaatgaatgtattcattaacttgattgcagtaatcatttcacagggtgtaagtatatcaaaccatcatgttgtatagtttgaatatatgcaatttttatttaccaattatacttcagtaaagcttggagtcggagggaagcagatatgtttttagaccattgatgtttccatttgtccttgccacttaacgcagaaatgtaagggctgactttaacatgattatttactgggagtacagacttactctcttgagaaagcaatgtgccagaagttcagggttctcagcacacttttccaactcttttagaaaagtcctagaaaaataaaagtatacaagtaataatgttttgattttgacatgtaggtaattaattttttaagtacaatcacataaggtttcaagaggtgcctagaaaaatgttctccaggccttcttgctcttatcttctacacattgattcagraaaaaaagctgtattctgaggtattactacaattaccctgaaatcactcacaactttaagttgttcgatctgttgccttaggttcacaaaaagaaaaataagaaagagaatgagaagaactagttgrgaaagagaggagaaatgagaactactcagaaggcacagggggtcaggatcatctccaattatcagaacacagctgttcgggtaattctaagcactagtcatagatagactggatacattcactgatgctctctcttacatgaaagtaacgttcataagaactgctgctgctgctgttgctattactaatatcattgacagcttactataagccaggcataagctaagtgctccgcaaatagtatctcatttaatcctcaaccaaagatagggttttataaatataaaacctggggctcaaagaggctacataacttctctggggaaatcaacagaaatgggtttccatttcagttttgcgtctgaccaacggacgaggaatggggttaggaagcaactgtggttcaattcaccaagcagcttttctccctctgtgaattaggtgtgcaatcttggggtcatcatagcgaataaagagagttaacaagttaccattcccatatgtgtaacatgaaagggtttgaagatgatttccaaagtcccttattcctgcaattctctagaactcaatatccaagcagccccgagttaaaagtacaacttgtttgagcagtcagcattttctaacaccctagttcccagcatccccttatgatagtagtatggagatgtgtatcttggtcatctttgtattcccaatgctgagcacagtgcctggcacagaacaggtgctcaaaaaatgctgatgcatgaataaataaacaaaggaacactcaactgcatacaacatggatgtctgacactgggtccctgttcctttgatgtctcttccctttctctccagggatcctgtggggcttctcccctcctttcactccaacccaccccaatccaatccactgactccaaaccacttgcttaaacctgaaaacatctaagtgttttcatctctcaattccatcagtctcatttccacccttctsttactctccattctttctgataacatgaattattatatacctgttgtgaaattcgtaaagttctctaatattcccaaagagaaagtccttgttattctgaagaacatctggaattagatgctttagccaaataaaatccattggagtgatatatccctgcagaggtgcaaacaaggtaggtgttacaaacaggaacataccagagatcatctgaattagctactgcaaaacccaaaactttagtgaaatgattgaagaatatagcacacttgtttcttgaaagctatcgtattgagtactttcttttgatatcattttcctcatgtgcccactttcagaaggagatggcttaatggcaatgatcataaaatggcatttttgtgggaagaacaaatatatttaaaaatgtttatgttacacaggtttaatctaaaagaagggaaaatgtacccactgttttatgaactaatacaattactattattattatgattattattaatattgagacgaagttttgctcttcttcccaggctggagtgcaatggcgtgatctcggctcactgcaacctccgcctcctgggttcaagtgattcttccgtttcagactcccaagtagctggaattacaggcacacaccaccacacctggctaattttcgtatttttagtagagacagggtttcaccatgttggccaggctggtctcaaacttctgacctcaggcgatccacccgcctcggcctcccaaaatgctgggattacaggcgtgagccactgcatccggcccaataattattttttaatatctgaataatgtttactcagcatatatatcatagtttactaaacattccctttttatggacatttgggttgcttctaatattttatggtaaaaatgtgattataaataatcgcgtacatataattttttccttaagattattcccttaggaaaatagggaaaacatgcatttttactcttaagaaaaagactactttaaaaaaacaagaaataatcttcccttattaaagtatcaggaacacttataatatcctttgttggcaagaagatggtaaacctatttgggctttgctggaatcagtgtgaactggcttaattctttggaaactatttggctacatggatcaagaaaccacagggatgttcttattcctactggagacacttgtaatattctaagacctgaaaccttggtgggaattctggagacttctggcaactattttgagtctctttgtacaacaaaacatctgcagtttgaatatatgcttgataccccactccccaaatctacttacatcaattatgcttttaatctcttttatgtaaatctcttcagtctcaagcaagtcacgtataatgcgcctgaatcacagcagcaggtgggagggtgaaagagagagagacagggagaggagaatgttcttttagaattctgttagaataatgctcatcaatacagttcccttttagtggctcacctacttagtttctggtcagttcattctgttctattgaacacccaaggtcagcatctcacaaacgcacactgtgatcacactggtatcaagaagaaacagcaaggttagagaactcaaaatcctttaggcagccagtgaatgacctgtcctctgggtgggccatatagtgtgggggtcaagaagggagatgttggagtcagaaataccaggtctggatccttagtcaaggaaggtctgcctgaccccacccccaccccctatattgtatacattgtataagtggtttcctagattttctctccagctttctgctcacatcaagctttcttttccttttaagagaaagggtcttgccctgttgcccaggaatgagtgcagtggcatgatcatggctcactgtagccttgaactcccgggctccagcaaccctcctgcctcagcctcccaagtagctagggctacagatatgcaccatcacacccagctaacgcctttttttttttttggtagagatgaggtcttgctatgttacccaggctggtctcaaactgctactttcaagcaatcctcctgcctttgcctcccaaactgctgggattataggtgtgagacactgtgccaggccagatccagatctttgacccatatggatgtattttgttgtacatggggttagatgtatgctagctccttcctctggcattggatgtttcactgtgatttcctaaggcaaaagatatgacttctgtctgcttctgtcaaggaatgcaggtggaagatgtggtggacagaatttaagacggtccccaagacttctggccccactgcacatacgcctcttccaatcaaacactaatttaggggatgctgtggaaggattttgctgttcatttgataggtaatccagttgggcctgtcctaatcatatgaactcagatctatmtgggtcaagtggtcagagactggaagcataaaaaagattcaacacaaaggagattcccctttgctgacttttgagatggagggggccagatggaatggaatgtgggcagccgtaggaactgagagtggctcccagctgacaggcagcaaggaagggaaatcagtcctatagttgcaaggaaccgagtcctgccacaaccacgcgaacttagaagaggatccagagctccacatgaaaacacagccagccaacaccttgactttagccttgtgggactcctgtcccagggaaactgtaggtctcctaagtttgtggtcagtttttatatagcaatagaaaaccagtagaaagagtaaggccagtccccacatctatcccagacagactttctttctctcctcaggctacgtggccatatttattatttcttttaggagtccaagtagatgagtgtttatacatgtgtccttgtgtagaatatatatatttattcttgttaactattgatggattatctattaaatggcagcctctcctagaaaatgatttgtttttctctcataaaaatggatgtgacaaatgatccaatagaaaaaaatgggaaaggacacaaaataggagattcacacaaatattcaaatggatatgagactcgtggaaaaaatactcagtacatacattcaacgaaggcatattttaaaagagcaacaattttcatctattagaatattaaacatttcaaacctcatagaaagactggtaaatgagggtgtggaaaaaccctcacacaatattggtaaaatgtgtaaatttgtgcaagctctttggaaggtaatttagaaacatctcacccaaatgtaaaacacgtgctccttggttcagtaatttcacttctaggaatgttcattgtttataattaggacaatataacttcaacaacaaccagatataaactggttacttaaatgctcatcaaaaaattatggtacatgggccgggcatggtggttcacccctgtaatcccagcactctgggaggctgaggcaggtggatcacttgaggccaggaaatcgagaccagcctggccaacatggtgaaaccctgtgtctactaaaaatacaaaaaattagatgggtgtggtagcgcatgcttgtaatcccagctacttgggagggtgacgcaggataattactcgaacccaggaggtggagattgcagtgagccgagatcacaccattgcactccagcctgggcaacaagagtgaaactccatctcaaaaaaaaaatatatatatacatacatatagatatagatagatatatgtgtgtgtgtgtgtatatatatatacatatatatggtacatacatataatgatgaaataccatgcaattgttaaaaagaatgaggctgactaaaacactgatatgacagaggccaggtatttttagtgaaaaaacaaaacaagacgtagacaagtaagcatagtatgactatttgtgtaaaaaatgaatgtgtatgtagaaatatacgtaaaactgtatatgctcagaaaatttatgcaaagaaacttaacacattgttaaaagtgattgcttttggagagtggtactgaaagctaaagtatgggaaaggagaatttctacatcttactctatacccttctacaatcttttttaaagtgaaacatttactgcttttataatggaaaaatagggtttacataatattttaaaatgaatgttactggaggtaatgatatgtaaaccctatttgatagatataaataaataatacaattcacatattttacagctcattattctttcttataatcatttttgtgtctatttataaatacttgtataagacaagactgataaacaagatgtaccacagaggatgtaatttccggaagtctaaaactcccaaaaagttacttaaacatcatactttactaagtcactgagaaagaggttcctatgccttttataaatcacccggaaacaacaacggtttctatgtcagaaggaagtacaggcctcaataccaatatgtttctacgagccctggcatcaagtgggaccacagcaacagttaagcattcatggaaaacctgagtacaatcagcctcttatgccttcatgaagcactgggcttaagcaacttggcaagctggcttcaggatgcattgacaattaaaggaagtcagaaggcagaaataaccaggaggtggacagaagtcaaggttattatccaaaaatgatctatgaacttaagagactcttaggagcttttaggactctaatacaggaaaatattcacatctctgaaggaaaagaaatcccttggtcatattctggattacagtttggaaaaaaagtctagaaatctcatccaactgcttcattttacctgttggagtgcaagagataaaatgccaaggataggaactccactgaagaatgtaggcaaatcaatattcattaaatacattcaaattaatatatgacttaaaaagagccctcacatcagtgttaggccattgcttttccttgcttctcttgttttcctttcaaatacctttataaaataggagaaaatgtatgactcttttttttttttttttttttttattatactctaagttttagggtacatgtgcacattgtgcaggttagttacatatgtatacatgtgccatgctggtgcgctgcacccactaatgtgtcatctagcattaggtatatctcccaatgctatccctcccctctcccccgaccccaccacagtccccagagtgtgatattccccttcctgtgtccatgtgatctcattgttcaattcccacctatgagtgagaatatgcggtgtttggttttttgttcttgcgatagtttactgagaatgatggtttccaatttcatccatgtccctacaaaggatatgaactcatcattttttatggctgcatagtattccatggtgtatatgtgccacattttcttaatccagtctatcattgttggacatttgggttggttccaagtctttgctattgtgaatagtgccacaataaacatacgtgtgcatgtgtctttatagcagcatgatttataatcctttgggtatatacccagtaatgggatggctgggtcaaatggtatttctagttctagatccctgaggaatcgccacactgacttccacaatggttgaactagtttacagtcccaccaacagtgtaaaagtgttcctatttctccgcatcctctccagcacctgttgtttcctgactttttaatgattgccattctaactggtgtgagatgatatctcataatggttttgatttgcatttctctgatggccagtgatgatgagcatttcttcatgtgttttttggctgcataaatgtcttcttttgagaagtgtctgttcatgtccttcgcccactttttgatggggttgtttgtttttttcttgtaaatttgtttgagttcattgtagattctggatattagccctttgtcagatgagtaggttgcgaaaattttctcccatgttgtaagttgcctgttcactctgatggtagtttcttctgctgtgcagaagctctttagtttaattagatcccatttgtcaattttgtcttttgttgccattgcttttggtgttttggacatgaagtccttgcccacgcctatgtcctgaatggtaatgcctaggttttcttctagggtttttatggttttaggtttaacgtttaaatctttaatccatcttgaattgatttttgtataaggtgtaaggaagggatccagtttcagctttctacatatggctagccagttttcccagcaccatttattaaatagggaatcctttccccattgcttgtttttctcaggtttgtcaaagatcagatagttgtagatatgcggcattatttctgagggctctgttctgttccattgatctatatctctgttttggtaccagtaccatgctgttttggttactgtagccttgtagtatagtttgaagtcaggtagtgtgatgcctccagctttgttcttttggcttaggattgacttggcgatgcgggctcttttttggttccatatgaactttaaagtagttttttccaattctgtgaagaaagtcattggtagcttgatggggatggcattgaatctgtaaattaccttgggcagtatggccattttcacgatattgattcttcctacccatgagcatggaatgttcttccatttgtttgtgtcctcttttatttccttgagcagtggtttgtagttctccttgaagaggtccttcacatcccttgtaagttggattcctaggtattttattctctttgaagcaattgtgaatgggagttcacccatgatttggctctctgtttgtctgttgttggtgtataagaatgcttgtgatttttgtacattgattttgtatcctgagactttgctgaagttgcttatcagcttaaggagattttgggctgagacgatggggttttctagataaacaatcatgtcgtctgcaaacagggacaatttgacttcctcttttcctaattgaataccttttatttccttctcctgcctgattgccctggccagaacttccaacactatgttgaataggagcggtgagagagggcatccctgtcttgtgccagttttcaaagggaatgcttccagtttttgcccattcagtatgatattggctgtgggtttgtcatagatagctcttattattttgaaatacgtcccatcaatacctaatttattgagagtttttagcatgaagggttgttgaattttgtcaaaggctttttctgcatctattgagataatcatgtggtttttgtctttggctctgtttatatgctggattacatttattgatttgcgtatattgaaccagccttgcatcccagggatgaagcccacttgatcatggtggataagctttttgatgtgctgctggattcggtttgccagtattttattgaggatttttgcatcaatgttcatcaaggatattggtctaaaattctcttttttggttgtgtctctgcccggctttggtatcagaatgatgctggcctcataaaatgagttagggaggattccctctttttctattgattggaatagtttcagaaggaatggtaccagttcctccttgtacctctggtagaattcggctgtgaatccatctggtcctggactctttttggttggtaaactattgattattgccacaatttcagagcctgttattggtctattcagagattcaacttcttcctggtttagtcttgggagagtgtatgtgtcgaggaatgtatccatttcttctagattttctagtttatttgcgtagaggtgtttgtagtattctctgatggtagtttgtatttctgtgggatcggtggtgatatcccctttatcattttttattgtgtctatttgattcttctctctttttttctttattagtcttgctagcggtctatcaattttgttgatcctttcgaaaaaccagctcctggattcattgattttttgaagggttttttgtgtctctatttccttcagttctgctctgattttagttatttcttgccttctgctagcttttgaatgtgtttgctcttgcttttctagttcttttaattgtgatgttagggtgtcaattttggatctttcctgctttctcttgtaggcatttagtgctataaatttccctctacacactgctttgaatgcgtcccagagattctggtatgtggtgtctttgttctcgttggtttcaaagaacatctttatttctgccttcatttcgttatgtacccagtagtcattcaggagcaggttgttcagtttccatgtagttgagcggctttgagtgagattcttaatcctgagttctagtttgattgcactgtggtctgagagatagtttgttataatttctgttcttttacatttgctgaggagagctttacttccaactatgtggtcaattttggaattccctgctttattattctaaagcaagcttgtccaacctgcggcctgtggcccaacacaaatttgtaaactttcttaaaacgttatgagattttttttgcgattttttttttttttttttttagctcaccagctatcgttagtgttaatgtattttttgttttgttttgttttgagacggagtcttgctttgttgccaggctggaatgcagtggtgcagtctcggctcactgccacctctgcctcccaggttcaagcaattcccctgcctcagactcccgagtagctgggactgcaggcgtgcgccaccatgcccagctaactttttgtatttttgtagagatggggttttaccatgttggccaggatggtcttgatctcctgacctcgtgatccaccctccttggtctcccaaagtgctgggattacaggcgtgagccacctcgcctggccagtgttaatgtattttatgtgtggcccaagacaattcttcttcttccagcgtggcccaggaaagccaaaagattggacacccctgttccaaagcatgtaattttattcacagaaaagactctcggccgggcgcggtggctcacgcctgtaatcccagcactttgggaggccgaggcaggcggatcacgaggtcaggagatgtagaccatcctggctaacacggtgaaaccccgtctctactaaaaatacaaaaaattagccaggcgtggtggtgggtgcctgtagtcccagctactcgggaggctgagacaggagaatggcgtggaccccggaggtggagcttgcagcgagccgagatcacaccactgcactccagtctgggcaacagagcgatatccgtctcaaaaaaaaaaaaaaaaaaaaaaagactctcaaggatttaccatctaaaatcatcaagtgtatatcatgcagatgaacaacagaaaacactgggagtattcaagtaattaaaaataacctttcagcaccaacagcaatttctgtcctgatggcaatctactcagagctagaggactgcacttaggataccaaagggagcttaggatgcaagagcagcctgcactaatgtactctgcgttagtttacatccgggcactttgctttacgtttcaaaacagacgccgcccttagctcattaaaggggaaatggaggtataatgtgttttaaagggatgtttcttctctgaagccatatttcagggtagcatgaaaacagagctttggatatctggttccattctacatgacacctcatgcttgtttcaaatgacaccacaaccaaggggcaggaatgaaaggaatatgctaaaaaaaaaaaatgcaatcctttttagcaagaaagatcattaaggatttcctgataagtttcttctttgttcatgtgccctcctctgctccccctttgaactactgcccctgtcacccccccttccccgcctccccgccgtttctcagttctccaatagggatccagtctgccagaggtctatttttgctcattattgtcaacacaatttgccatcaagagttttcacttactcctgctatcctatcatcacattatgcatgtcagaaagcattacagatttttacttttcaagaacccgaactcagatttccaggcttctgtccttcctgtttcatgctgttgactctcccacatctttgtcttcctcctagacctttggtcactcttgagcccacattgccaatggtctatatcattttcacctggatgcctcccagacacctcagtcacatcaagttgaaatagaactaattagacagaagtagcatgtgtttcagtggaactgacatttttctagggtccctaaaacacaggtgttgtttcaaactcccccctccaacatcccttatattctctctgtcacccaggctccttatatcatctctcaacatgcttcctgggtgactactgactctccacttctggtgacaccccacagagcaagctttcaattcctgtcatttaaacactttagtgcactcatagaatctcatccttctgagatttctcttccaccagtctattttgcagaccaccaggctacgcccttccaaaagctcctttgagatggagtttcactcttgttgcccaggctggagtgcaatggcatgatctcggctcattgcaactgccacctctcaggttcaaatggttctcgtgcctcagcctccccagtagctggggttaaagttgcctgccaccatacccagctaaattttgtattaggggttttaccatgttggccaggctggtctcgaactcctgacctcaggtgatctgccacctaggcctcccaaagtgctgggattacaggtgtgagaaaccacgcctagtcccccaaagctccatttttatcctgtcttcattctctcttcaagaacttgcccacagctgccagagttccttctaagagtttaagactctctgttcatgtggtaagaatcttcttaaggagcttgctttaaaggtaaaaccagatttacacatcagaatggggagaggtgggtgggagctaagatggaatctgtaattttcacaagtgccctggatgattctactgcagatggtctcctattcaactaaatagcactcatctgacccactccttttagaccccacttctgttaagccagtgttatcgctattttccactttctttcaagttctaatcatccttaaaactccaacagcttcagctgaaatcagtaccacactctcatccttgtttcccacccaaaaactattgtactaattgaccagacatgtattgatgccctactatgagcctggctccatgataggcacttgggatagagaaatgtaccataatcctgaccttaataaatttagagtctaatggaagagataaaaaaaatcaatgattccaatgagtgtgataaggtaaggctagtcagaaaagtcaggtgcagaggaggggcaactaattaaaccaggggttgggggagacactgccaactctgtgttgagtgaagtttaagcagaggtttttctttaagtaaaaaatcagtttttttaaataaaaagttttttaaaaagtaagggggaatagaagaaggaggtttgtccctaaggggaacagtgtggaggaggaaaggaggtgaaagtgtatgctattctgtgtactggcaaattctttggtgggtgatatggtttggctctgtgtccccacccaaatctcaccttgaattgtaataatccccacatgtcatgggagggacccagtggaaagtaattgaatcatgagggcaggtttttcctgtgctgttctcatgatagtgaataagtctcaggagatctgatgattttataaagggcggttcccttgcacatgctctcttgcctgccaccatgtaagacatgcttttgctcctcctttgccttccaccatgattttgaggcctccccagctatgtggaactgtgagtccattaaacctctttcctttataaattacccagtctcagctatgtctttattaggagcatgagaatagactaatacagtaaattggtactggtagagtggggtgctgcagtatctgaaaatgtggaagcaactttggaactgggtaacaggcagaggttgaaacagtttggagggctcagaagacaggaagatgtggtaaagtttggaacttcctagagacttgttgaatggctttgaccaaaatgctgatagtgatatgggcaataaagtccaggctgaggtggtctcagatagagatgaggaacttgttgggaattggagcaaaggagactcttgctatgttttagcaaagagcctggcagcattttgcccctgccctagagatctgtggaaatttgaacttgagagagatgattcagggcacctggcagaagacacttctaagcagcaaagcattcaagatgtcacttgagtgctgttaaaagcattcagttttatgtattcacaaagatatggttcggaattggaacttatgctcaaaagggaagaagagcataaaagttcagaaaattggcagcctgatgatgtgatagaaaagaaaaacccattttctgaggagaaattcaagcctgctgcagacatttgcataagtaagatggagccaaatgttaatcaccaagacaaaggggaaaatgtctgcagggcatgtcaaggacctttgtggcaacccctcccatcacaggctcaggcctaggaggaaaaagtggttttgtgggcccagcccggggacccctgctctatgcagtctagggacttgttgccctgcatgccagttgctccagccatggctgaaaggggccaaggtacagctcaggccattggttcagagatgcaagcctcaagccttggtggcttacacgtagtgttgggcctgtgggttcacagaagtcaagaattgaggtggatgtacagaaatgcctggatgtccaggcagaagtttgctgcaggggtggggccctcatggagaatctctgctaggggagtatggaagggaaatgtggggctggagtccccacacagagtgcccactgggacactgcttggtggagctgtgagaagagggacaccatcctccagactccagaatggtggatccaccaacagtttgcaccatgtgcttggaaaagctgcagatacccaacaccagcccatcaaagcaaccacaaggggggctgtaccctgcaaagccacaggggcagagttgcccaaggctgtggtgggaacccacctcttgaatctctatgagacatggagtcaaaggagattattttggaactttaaggtttgactgctttattggatttcagactcgcataaggctgatagcccctttgttttggacaatttctcccattttgaacaggtatttttacccaatgtctacacccacattttatctgggaaatagctaacttgcttttgattttacaggcacataggtggaagggacttgccttgtttcagatgagactttgaactgtggacttttgagttaatgctgaaataagtctttgggggactgttgggaaggcatgatttgtcttgaaatgtgaggacatgagatttgggaggggccggggtgaaatgatatggtttgtctctgtgtccccagcttcatcaggatcctcccacacatccccattctaagttgcagggtcccattcttttccaatcaatgccctcattttaacagtagacacctggtgaggctgtgcatgcacctttcattgcaggtcagccgctcccatgataagagcttgtatctgattttccacaatttcagctctttctctacaagagataagactctcactctggacaatcttagaagatttgaggctcagtgtatgcttctggagctgggagttagaatccctaagttcatggttttcttctatcagtttgtccagtgaacttaggagcaaccaaccaacttcgttatattccttggtcctctatatatggtcaaaggtattatgtatagagtcattaaactccttgcctctcatgagtggtgaatcaggagtactgaatgcatttcttttgcataagtgtttgaacagttcgtgccaaggactatcagtgttctccacacaattagaagtagagtccttagcattttggggtctaatcatattaagcaaccaactccagaaacccaaaaaccaactaaagaaatctatccttctgtaatcccagcactttgggaggccaaggcaggcggatcacgaggtcaggagactgagaccacagtgaaaccccatctctgctaaaaatacaaaaaattagccaggcatggtggcgggcacctgtagtcccagctactcgggaggctgaggcaggagaatggcatgaatccaggaggcggagcttgcagtgagctgagattgcgccactgcactccagcccgggtgacagagtgagactccagctcaaaaacaaaaaaaaagaaaaaaaagaaatccatccttaaaattctgttcctctagaaccattcccagtaccaaaatctgattaaaaaaaaaaaacaggcagaggaaggtggaaggactagatctttctccagtgctggatgcttcctgccctggaacatcagactccaagttcttcagcttttggactcttggacttacaacagtaatttgccaggggctctttggcacttggccacagactgcaggctgcactatcagcttccctatttttgaggttttgggactcagactggcttcctgactcctcagcttgcagatgcctattgtgggacttggtatcttgtgattgtgtgagtcaactctcctaataaactccccttcatatattcatctatcctattagttctgtacctttagagaacactgactaatgccgtggggttaagccaatcgtctagtaggttcataaaatgctaaaagcagatataaacttaaagacgatccagctcatctcttcattttacagatgtaaaaacagaagtagaaatagaattggaaccccagtttcttgaaacccagtgtttgcataataccatgctaatttcattctaatttgtgttttatttaataatcaggaaacagttcaaatagaggcccagggctctgaaacattgcccaaggtctatggcttttgcaaagcaagtactgtttctgctactttacctagttgctcttggcctatgtttggggtgcatctaaagaactgtttgctgattattaaataaaacacaaattagaatgaaattagcatggtgttataaaaacacagggtttcaagaaactggggttccagttctatttctacctctaggatacagggtaagtcacttcctttctcagattctgtttctttgtatgtcaaagggctggattagataaacttgacttcccctcttggccctcatgtatcattctataaatatgttatcatttctaatagactgtttgatgtaatcttttgtctaatggcccctgcttttcacaataaatgaaacaaaggtcacaagacttttattcatttgcaaccctgattaactaacagttaatgtgtaactggagtgccacatagaaacagaaaggagaaggggaatggattgggttggagaaggtgaagtctgacctatcctctacaagaggtacagggtttatccaggaagacaggagtgccatgaggagtaaactccagcaggggctggagtcatggccacacacagggccttacaggatccaggctgcccagagcagagtttggatgggggctgggaggctgggggagctagctgaggagatggttgtcatgccaggccacgagtgtggatgagtgctggccaggggaggtataggagattgatggggctgtggcaagcagggcagatacccttccaggaacctgtttcattaaacacagaatacagtcctgagggctcggtctcaatacagtcctgagggctcggtctcaggaaaacatgttcttaagttttacatccttcttctgttttgattaggtgtttcctgattataaaataaattcctagaactgttaatggtaacaacacaaagcactatagacccatacgaggatcatattgaaaccaatgacatttaagaataaaagatctgatgaatatgaacacttccctggttcctaggaggataacagttgagttttgctcaggtaatctgccttctcttccttcttctctgctttrtatctcagtttctatattttgtcttacattaataggatttgttctcattaccctgatgattttatggtaaactacctcaaattctttttggaagaagatgggatataaattatttttaaagtttatctgaatagatgttcttcaatatcacacaataaataatgacaatgtaactttgtgcatatagcactttaagagattgatcataaacacaatcctattaatcttaattcaagttaataatgcttgcatttgtatggcattttaggtattataaagttttttttaattgtggtaagatatgcataaaatttactatttaaacctttttgaagtgtatagttcagtagtgttaagtacattcacaatgttgtgtaaccatcaccactagccatttccagactttttcatcatcccaaactgaatctctgtacctattaaacatgacctcattctccacctccccacagctcctgggaacctctattctactttctgtatgaattttcctattctaggtgtctcatataagtggaatcatacaatattcatcctttggtgtctggcttatttcacgtagcgtaatgctttcaaggttcattcatgttgtagcatttatcagaatttgattcatttttaaggctgaatatcttccattttatgtgtctaccacattttgcttatccattcttctgttgatgaacacctgggttgttttcaccttttggctattgtgaataatgctgctatgaacactgatgtgcaagtacctgtctgagtctctgctttcaattttgggcatatacctagaagtgggattgctggatcataggatcattctatttttaacttttttgaggaattgccataccacccgctacagcagccgcatcttttatattgccaacagtgcacaaaggctctgatttctccactttctggtcaacatttagattatcattctttttttaaaaaaacgtaatasctaacccaatgggcatgaagtaaggttgtttttgttttttgtttttaatgtgtgcgttatcttacttgatccattaaatccctaacaagaactcctctagggcagatgtcctgtcttattcatccttggccccagtgtcttgcaagcaagtgaattctcaataagtgttaattgaatggatggttgatagatttataggatgcatgccaattctgtggacgagagtaggtactaattgttattttcatttcacagaagagcaagtcagggctccgagcactaagtgacttggctgaggtcaaactgcctgcaagttttatctaatagtgacagaggaaccaatgtgtcgagcatgaatgtcagtccattgaaacagtgcccacttttctgactctgctccttaagagacagggcctgtacagcaaggacacagagaagcaggttacagaaaaagggctggctcatccgtgtatgcctggcatttgaggaatgtggctgaaatctcaacactctggttcagaagcacatctgcaatcaaatataacaagacatggtatgagagatgtctggcataccaaggagattcctagaatacagcggataggaaaacctcattacttcaattcccaagaaagagtactactggtagtaatcccaacaggagtatccaagtaactcggtaatcttcagtaaagaaaagaaattgtgaaacaattatagtcagtcctccatctctgtaggttccacatctgtggattcaactcacctcatattgaaaatattaataaataaataaataataacaatataacaattaaaataatgcaaattttaaaagcataacaactatttacatagtatttatattgtattaggtattataagtaatccagagattatttaaaacatatgggagagtgtgcataggttatatgcaaatactacaccattttacataagagacttgggcatctgtggactttgttatctgcaagggtcctggaaccaattccccatggatactgagggtcaactgtaccaagytgaaaacaaaacaaaaggaaatctattgcaaaaaggaaattcccaaagataaaaagcatgtctatgaaatagtcaaagagccgaaaatgttgggaagacccacactgctttccctgccctgtgcccctttttgcagatctatttgtgtctttatctaccagcagatattctattattctaatagattcctgtttttcccaagagggtttacttatttattaaatatgatgcaaacatctctctcagagatgttgctctctcttcctaggattccttagccctaaatctgcagagccaattaggtattaatattgggctttacaactttggaccatctgaccaccaagactgattcattaaatgtatatggtttcagatcacattaatttatcatagactttagaattggctttttagaagtactgctataaggaaaatctcagcatagcaagttttatctaatagtctacttgtattaaagagtactcaatgtaaaccctaggaagacttttaactgccttttggaaattggttgagtgggatttgaaccgtgtactctctgtaaagcaggaaattatcacttagtaattactaagtatttaaaaatgggaaatagaaaattacatttcagacctggtgcagtggctcatacctgtaatcctaacactttggcaggtggaggcaggtggatcgcttgagcccaggagttcaagaccagcctgggcaacatagtgagcaactccatttctactaaaaataaaaaaaattatttgggcgtgatggggtgcacctgtagtccccactactcaggaggctgagacaggaagattgcttgagcctagaaggtcaagcctgagtgagcagtgaccggccattgtattccagcctgagcaacacagcgagaccctgtctcaaaaaaaatgtatatttttaaaaaaagaaaattacattttagttgttccataaatatcagtacaaccaaacctaagtgcaaaattcccaacacaaatgatcgcctctgggccagccatgtagcccccatcttgctgtcaataatcatttccaggggctgtaattgtcttccttccccctgtaccaccccatcacaggacacaaattgttttgcttagtttagatagctgtgactaaactaagtgccaattgtcttttaaaatatgtgttaatcagcactcaagattgttcctacaaaaatgtcactccctcactcaatttgcatgtgccctcctgagtaggagagaaagagctgagttagaggcagccctctgggacctgcacagaaccctgtatgcttccgggagtgtggagtgtgtgtctgatctgctgctgggaaaaggagaagaaatgctgagacactcactgccaggggctggtatcaggccattttcacaggggctgttggagggttgacagcacagctctactggaccagggagggtcccagccagcagggcctgcccctccgaaactgtccctgtccctgtccctgagaggccccactgagtgtcagatggcacataagagatttccttatgcgttggtgtgaaggagatgatcagttccaggaggcccctcccccatgcagaagagaagaaaatggaagaaaccgggttctcagagtggcctgcgggtgagtgccgccttgtgctgtcagttcccttcaccttccagttctgggtgtacctagtgtggtttcatcaaactgctgaggccctggaattgagggaggatgctgaagggtgccaggccatagaagcagtagcaggagctgcagcaaagagctagtgtgtctccagcgtcagcttttgggccttggtggcatcaaaggagacgtacacagggccactgtactacggatgggattcttggaacaaaagtttgaataattgatgagtgtggaagtgctatgcaaaaattcaattcaacctgcagttaccaggcattcattctgtgacaggcattattgtgagggtggcaaggagacggggagtctctgagagactcagagaagagcagggcatggtgtccacccacaagagatctgaagactttcaaagtagttgggaaaacagacatacaacttttttcccctccccacagctagttgaggcaaaagacatataacttatacagtgacaaaatactactgactgttactgacacataacagcctgggctgggtcactggtgagaaaaaggaggattcttgcttttggggcattcaagtcctgtccattaaccatttcccaatcccatatttatacatcccattttagacatattaagctgaagattgatgtgacatacccaaagacacttaaggttgaagctgagaatctgggctagaaatataaatcaggatgggctgggagcggtggttcacgcctgtagtcccagcactttgggaggccgaggcgggcggatcacttgaagtcaggagttcaagacctgcctggccaacatggtgaaaccccatctccaccaaaaatataaaaaattagccaggtgtggtggtgcatgactgtaatcccagctactcgggaggctgaggcaggagagtcacttgaacccgggaggcagaggttacagtgaaaggagatcgtgccactgcactccagcctgggtgacagagcgatacttcgtttcaaaaaaagaaaaaaaaaaaaaagaaagaaatgtaagtcaagattaaagacaatgggtgagatcagcaaggagcatgtgtgcggagaagagaacaccaaggaaggctgcgtgtggtgggaggtggccggggggcagagaaagaggcggcggagccaaggagatagggcatcgtctgaatggtgatgctgtatcaacagatgtgaaattcccagaggtgtgaaacacagcagatcctttacagcacgatgacaggacacagcatgagcctacctctgccaggtgagaggagctttctgcaacctgtgatgggctcaaggatgctgaccattcatccgcccattgggatagcccaggctctgagctcagcactccacccgtcactgcgattgcactaatcctcacccacccttgcaggcaggtattactgtgggcacagagaagtttgctaacttgccagagatcctgtgtaggaagccaggtcaggaaacaaccagagtctctctaacagcccaggccttgaatgaacaccggcctgcttcagaatacatggcccgtgatgtgtttgaattcacagattcactggacaggttccctatagggcctgtgaggaaatctggtctaacagaatccagaaagacaaatttcgctaaacaggtcaagcctgatactgctgctacacttcagctgtgttaagccactcggttatcagacctgcttctcctttcatgattttagtaacacaggcctcttccttgggcccctgttgctcccaccatctcccaggttctcttgtactcagggtttagtctcccctccccactactaatgatgcatgtgccttactctctgatcatctctcctaaatctgctactcctctgctctttctgtgccttatctatccctgccgagtctaacatgcagattttggtcattccaaagtcatgtatagatctaatcacagggctctctgcttaccagctgctacttggataaggaaagcatgccaacacggtcctccttcttcatgctggccaagtcagcatcattattattacctaagtttatttctaacacatctcaatatcttcatgcactccctcttgataaaagtaactgagcatagcaccatcaataccatcaaatctgtcattctcttcccctctctctgggtgggacaggaagccaggctgctctaggaaatcttccctaacaagcaaaggggacttgcctgtcctctcgcatgtgtgatctgagcttgtgtggatcccagagtgggcattctggactacttgaccttgcctatctctccttcacaccctctcatctctccctcctaccaccaaaaaacttgcatcgtatttccaatctccagacatacttttgaaaccatttatctatctggtgtgtttatctgtatctagtatgatgtgaatatgtgatttgtatgtgtgtctaccactgttttggtcagtttgtatttctcgtgggtacagttctatgtgctcatgtatgtggaacatatgtatactgacacatggacctagctccaaatgatctgaaaggaatataattgtaattgaatatttgcacagatatacaacatacacatgtgatggctgggggaaatgcatgtgggatttcagtcagcattttattagagaaggtatgtcattagtgctgtattaacaatgaatcagcttatttgtgggtcactgtcaatgactcctttgcaaatcacacatgtaaatatttctgtctgtggtctgatgaacatgcagtgccacagtctgggagatgctgagccatgccctgtgtaggcagcatatgaaaagaactgcatgatttaaaagatgctgaccagcttaaggaaagcaatttaaaaacttcctaaaaatctagtttgaatgaacaacagttttcattttgtgtgtgtgttttttcttttagagatggggtcttgctatgttggccacgctggtctctaactcctgggatcaagcaatcctcctgcggctcagcctcccaaagtgatgggattacaggtgtgagccaccgtgtctgctggccccactgttttaaaccctgattcgacaatcatacatttaactcattacctgtcttgttccttttacgacaaactcaaagcttttattttactaaagtatttgggttaatcttttgcttttctgtcatgttctgaaatatgtacaataacagaatcgctcaaaatattatctccgttaaatgttttgtggctttagggagaggtctaacaacatgcgggaaacaagaaatcaagcgcatccaggattcatttataatctctctcgttgagtagaagtccgcatctctcgatattgtctggttacctgcatgaagtattctaaaggaggaaaatagctcaaagaggacattcatgtgcactctggcttccagttggccatttgagtaagtgatcgcaattaactgacgagcggcagggaaacacttcctggaattctcatctacagacaagaacaaactggggcggggcccatcaccttcacctacgcgccgggagggtggcggctggcgggcggggccgggctcgggccgtgacgccgagagtgcggggcgcgcggctgggagcctcgcgcccccgcccgggcccgcccccatcccgcccgcatacagcccgcatcccgccggggaagcgagcccagtccagcgctgcccgtccagtcctcgcccaagatttaaagcccgcaagttttgttcttgagaccagcgactttagctccgatgcgggaaggaaagccgacctccgatttggacatttaaagagctgggcttgaacttcgtgagtttcgctctaaactgcccttgaaatgaagctggacttggaggtaaagtcactgggaagctggcctggggcggggtttccccctcttctcgtattttagaaacggacagcggcagtgcagccctagtttgctgtaagtttccttactttgttactgaggcccccagagctccacgcataagtggtgtgaccagaaaccttttaacaagacccgcctgagcctgcgttagagctcccgctcggaaagtaaaagaccatcctaatccgcggcgctgcggaaccggtgtcccgtgtgggaggaaccgcggcgttccctgggcgtagggcccgcgaggccagcacagtccgcctcttggcggagcgccctgggccggtggttccgcgcggagttagtctgtggtcagttacgtggtgaaaacacggctgtgccgcggccgcatctttccgcggccgaggcctctctgggtgggagtgttggcttcctttccggatcgctaaatggggaaagttctggccgctcggcgggatacgtctccaggccacggatggttcgttctccgtgccgcggccccgagctgggctccctgggtctccagcgcgggctcccggcattgggggctgcgggccggcccctccgccccgcccccgccccgccgcgcctcctcggccgagcggctcgcggtctccggcgcgggaggctccgagtctgcccactccgggccgagcgaggtctctggaggagaagagtggcgaggaggtgagggcacgccggccctcgcccggcgggtggcgccaggacttcaggtgggaacgcgcgcttgggccgggggcgcgtggctggcgtggacaccggatcggggcccgccgccctggcccggaccgcgcacggcccagcgccgggaagtcgggaagccggggaggcctctcccaccgcgggccccggcagcccgccctctgaaagcgcggcggagaaggaggctcgtcccctccccggaacgcctttgttccctccggcctgcccgcgcgggtggccagcggctgggacccaggccgggccgccgcccaggtgcggcaggtaggctcgggggccgggcagctccggttggggcggcttcccggggcctgcgggtccccgtccctgaggagctccggctcctcggtggcgggacaggcccgtgcgcgggagccgcgaggcgaacgccgcgcccaccaattcggttgccggccgggggccccaggcttgcggccacccgcctccggctggagggctgaattcgagtcgaaagcccgtgtcgggctggaaagaagaaaccgccaacctgagaacgctttcggcgagttactggcgggggaaatggggacagggaagtgggcaggcggggagactgcagccgcagatctccctggcggggaggtcgtggccactctttcctttgactctgcctcatttcattttgaatcctgatgtgacagaggcaattgcttgcttggataccatataggtaaaagtaacagttttcaactcgactcttgactacaccctgtacattcttggccggtgttggttttcttaggttatggatcatgttaaaggtacaccgatgtggtaaccgcacagtggccgatggtggcctgaggctcatatttatggtaattatctgatgaaagtacatccatcagaattggatttgtgcgtctgtgcctttattttgggaaaccttgcctgttccctgtgggggatgggagaggaatgtgaaaagccgaagttgacccagaaaaggatgattgaaggtagttgtattaagtggtggcaccgaaatgattccaccctgaactttctgaaagggtgattagtgatcagcagcagacgttataactttctcaaaataaatttatggtagattttctatctggtcacaagtgaggaggtgaaagctgctttttggggccaactctttgcttttaaagcaagctaaacgcaataccagaaaggtttccattctgtacttaacctgcttgtccttctcactcttccttatcctcccgcacacgctctgagcattgactgagcactctgaggaggaggctgactcaggctgacccttcccggccctgcaaggctctaaggtagaaccagtgttatcacaggaaaggcccaagccaaagctcagagcagctgttcctgagaaagtgggagatgaggatgagtaggaggtagagatgcttataactgctctgcccagagaaaactcagaaggtgcagaagagttttcaaaataaagtgcaggccccatcaagtaaaaaatgaaacattgtatttcattaaaatggtgatcagttttctcttttcataaaagacattcaaatggtgagattgtaaaaaaaaaaaaaaagaaaaagaaaactttctaattctcaaaaatagaacagcttgaataataactcatgggttttgaaatgggtcatcttttaaaatgggtcactttggctagaatcattgcacttggtgactttcacattgtaaagggtccagttctttctgaggcccaattgcactagaatctgcatttcagaacacaggaggtatcaggaagaaactgggagaaattcagagggaaattgtctcttctcagagtaacaaaatgtcccctattcagggggaattttatatatgctgaagtaaatagatctcagctttgaatttttataatacattatgccttttctgaaatatttccatagccattattttaatgcattgttagaataaccttgtaaggagaggaattcattgtatctgtgttccagaaactgaggcacagtaaattacaagagctctgccctttgatatcgaatctctgtgagcgaagatgtaaccagaacagtgtaaatctagaattactttccttacggtatgcaatatctaattattatgtattagtttacatatatataggggatgtaagaatctttatatttaaaggataagaaacttgatcaggtgagatacaagatttgaataaaaaagcgattttttagaaacattttaattctacaaattcagttgctggctttgatatgtaacttattcagatttctcttccatagaaggctttaacactagaagccagttctctacaaaagagaatgttctaccaagtgtgtaggcaacaaagcccaaaagttcaagttcaaaatactgttctacagcctaagatccacctaatatttcagatttgactcttttgctcctttcctataacttcctataactttttcatagtgctctaagcaaagtaagttcaaggatggactcacctcaagtttccttctcttactttagaggaccatataatcttatacctgtgtcatcctaattgaaatgtattttaagtgcttgtgggaacaagaataacggaagaccgttattccattaatggaataatggggaacatgagaaggaccatattcagtcaattagggatgatacttctgcctcaacagtatttgcgatgtgttaaatggcccttagccatcagatcagtatttttaaaaactcctacctaattaatgttttttgagaagaagcatattatgagtatagctcagtattctaaaaagaaaaaaacctgaaaaaaaaatcagccatccattaactaacccatcctggtaaagctacacaaacagattctagagaaaggaaatttgcacagatggaacatctaatctggactgacattgtcaacaagttatctcaaatgatcctgagaaaacactggtacatggtttagagacaagtcgagctcatgtgactagtaaatggagaggcacagtatacatctacttttgttggcatttaaacactctcggcttttttactctctttcaccaccatcaggtccagattccagcttgcactggaatatttattgaccctttgatagaagagctacacctgaaacatctctgaagtctttttagcatcctatcctgcccatggcctactacacagtatgtgataagttaatgtttgttgaattagttaaatatacgtattaacctactttcagggctgcccgctgtaatgcctagaatagggcaggcacttaataaatggtagttaacttagactaaatgttgatccaccaagacagaaacatgttacatatacctcttgttttacaccatcttctactttttgtacctctgtgttataaaccctctatcaagtgttgcttctaaagacaatgtccagaatgggacgtaggaactgccactgggcaacaggcagacactgggttatatcgtcatcctgtttctgaatcctggtttttcttattattattcaaccacagctaaactttctgatctccttttttccgttttttccctttaccctaacttctagccaaactaagtgatttgacatttccccactcaagccacaactttttctcttatgtgcttaaaaaaaattcctgcgtagtctctcttggaatgtcttattccttgctccctccacttcaccctttttttttttttttttttttttttttgagacggagtctcgctctgttgcccaggctggagtgcaatggtgccatctcggctcaccgcaacctccgcctcctgggttcaagcgattctcctgcttcagcctcccgagtagctgggattacaggcatgctccaccacacccagctaatttttgtgtttttagtagagatggggtttcaccatgttagccaggatggtcttgatctcccgacctcctgatccgcccgcctcggcctcccaaagtgctgggattacaggcatgagccaccgcacccggcccacttcaccctttaagccagttgaaatgctccttgccctactcctcccttctccttttctttctcccatccaagtactaaccaggcccaaccctgcttagcttctgagatcagccaggatcaggtgcattcagcggggtatggctgtagacttctctttctgagctgtgtcttcctcctttcctccccaaacccacatttgaattctgttctagctcctgctcatttgccacctctcccacaaagccttccccagtttccatcttctccctgcttccctcatctcagaggaaagctcttcattcacagagcacctggtttggggtccatagtttgttgtccctcagtatccttggggaattagtcccaggacaccacccccccgcccctgatatccatgcatgctcaagtcccttatataaaatggtacagcatttatattataacctatgcaatattcccatgtactctttttttttatttttatgtgtttagagatgggtctcactctgttgtccaggctagagtgcagaggcatgtagccttgagctcctgagtcaaatgatcctcctgcctccgcctcccaagtagttgggattacaagtatgagctaccacacctggcccatgtactttaaatcatctctagattacttataataactaatgcaatataaatgctatgtaaacaattgttacacggtattgtttagtgcataatgacaagaaaaaaatgtgcatgttcagtacagacacgaccataaatttttttttcaaatgtttttgatctgtagttggttgaatctgaggatgcggaacccatgaacgtacacgaccaactgcatatgggtttctaataacagatttgtggatgaagcccacccaacataatgcaacatttcaaatgtatcttagtcagtttttctggggcaaagccagcctaacaaatctcaagaatgtttgaaaaattctagcttgagtgaacgttgttcttctagtgactcaaataaagcagtcattgtgtctgaggagtcctagtggggtggcaggggtggggctaggagtagtggctgtttgtagcatgttttatatcacattaaagggctgggtatgcattttaggcaataattcttactcttattgataggagaacttgtattttttattcatctaccttatgatggataactggtttacatctcttcatcaggtttacttcttacgtgtcattttatgagctgactttgaatatatcttcagattttccctgcctttacacatgaaaacggttttgatacagctttttcattagagaatggcagcttttccaggccagggtgtctgtgtctgactcctcgcctttcattttacccaatacttgcttaaaacatcctccctgagtccggtacttttttgcctcctctccttccttccaccccacctctttttgtcaccctcctgcgactttggatctccatccttggagtccctgaatcttttttgtggttgaaagactacacccaaaggacacagactgatgaggtcacttctgcccactgtctagtactagtgagaccaagaagaagaaggagggaaaactgaaatggaaggtttgaaaaagagtgtgttagtgaaggaagtaagaacagtgctaacagaatgcagcaaaacagaaatgacttcacacttctggcagtgaagcaaattctcatccatcttgggttgcttctcttgaccctgcccacctcctcccctgccctcccctcccgatgagaactgcaggaacacctgtgcccatgccaaggaaaaagggcaggtgaggaacacagggatggggctgggactcacaagctgctctaagctgccacagggtctggaatttgttgacattacatggttaactcggtatctcgatgcctcagtatcttctgcaaaatgtggagggagatcctttcttcctcaaaggttgttgtaaggcttaaagagctaccacattcgtaaggcatttggaacagggcctggtatatagtagacatacccatggtagtaactgttgctagactgggtaaaaggagaagtttcttaagtaggcaagaaaaaaactgacaacagttatatttaaaagagcaagcaaccgtgtcagcccaaacaagtgtgttgcaagaatgagcacagagggccaagctcagaaaagcgagtgtttgacctctctgagacctcctttatatgtcagcttttttatttgtttcaaattttgcataatcaaactggttactgggaattattgagttcatataacttccctaaaatctaagaataatctataatcccatgccaccagtcccgttaataaagacttagggtctgtctttacccatttgttcatttgaaattccccgtctttacttcccccataaccaggaaacagatctacacccatgtttaacttataaagagatataagtgagtttacataggtggagatcttgtacctggattcacattgtaggttttattacccagctttcccctctatcccaaagccatgattgccatagtggaatttaaagtctttggactaacactgaatcaagaactaactctacaaatgtattctctgcaggaggataagaattccaaatggcttctaattgttgcccatggcttgaaataaagttccatatagctaaagccccagcacaaaaacacttgaagacagccattaggtagaatttcttttcttttttagaggtcttatattggaaatgtaacagttgcaaagatatctaatgtttcaccttaaaatgtgagttataaattcacatttcacattgcctccttcctccttgagcaaacagactaggcaattagtaccaaatagtaactagttatatttcttaacaccgattattgtaagtaatttattaagaaaaaatctaggaagatcaaattatagcttttccagtaaatctggggctttttattcctgatctctctcaacaaggcagtttggcttctgaagattggtcctagctatacttaacaggaaacagatgacgagaagaagccaggaaaaaatacttggaatatagaacaaaatgcagcataaagatggtacagaagattttatctttctttcctttagttatgtgtggacaggaactaaaaactctcccacgtgggactttattaagtaataaaagtttaaatgtaaaagatataaaggaatgaggatataaaggaaatttttttaaaaactgtgactcaccggaggagccttatatagtctactttctaagcatatcacttttaaagggatcattatattttcatgatgcatggggatattccaagtattaaattgattttttaaatgaagaaaattatcagttcagtcttgttttctatgtaggtttcactacagtattttatttcccccgcaaggaaaaaaccagagctagaatggaatgattaaatttcttagttttcttctaatctgttagtctttccattaaattatactgccttcttatatagaatttctgggtttgttcttgttttggcaataattgaagtaagagaggatgattttatggtagaggtttgattccattctagattggtgtttttcagctatgtagaacacaatccattcatggttcagacaaccgttttaggaggttttcatgtccagcattaaaaaaaaaaaaaaaagaatagaattgggcattcatatatatatatatatatgaatatttattaataaaagtttaaaagatataaaggaatgaggaatgcatatatattatatatatatataccaaattaaagtatcataatactaatacaaggattagtatcgttttatgatactttattatatacactaagggttagtcttgttttatgatactttattatatacactaagggttagtcttgttttatgatactttattatatacactaagggttagtcttgttttatgatactttaggttggtatacatacatatactaagaatgcagacatgtccatggaagttggcaatattcagcccccagcaggccccagtcagcaggacagggattaggggagtcaggtgaggcagggctgtataagtgcagggttggagcctgtcttggtttaccgttttgacattttgttcactgtggatttttttcagtaactttgattttttaaaaatattgcatcaaaatattatactgactacggagtttttggtacccccttaaattgtgcacctaaaataagtggctcccttgtctccccctagtcccggcccgatcagtatgttttatagagggaatggtgagtgttggggaactagggagcccatgaggaggcggcccagaaggggaggaggagctgatggtgtgtctgatgtctcctcctttctctaggaagcagacaggaggtgaagtcttcagggtgggggggacagagcctgggagggggagatttagcatggccgctgaagagactgggaaagggagaaggttcgggacaagttcaggaacagtcacgtagcactgaaaactgctcaaagctagatagtgccatttgtggtgacgctgcctgcctggtaagtcccatttccccagcagccctggaggtgtcataggaacaggaagatgggagggcgctggggtctggggttgttggggtgggagggcaaaggtgtccaatgattctgcatctgaaacgggggaggtgtgtgaggaagaaaggtcaggagactgctgggcagggtggggtggcagaaggttctcgatgaatatttagaagttgcagctgaggagtgagtgtactatagagtgagtatcctggaatttgaggtctcagaagaaatgcagttctcagtgaagccatgtaaacaacttcctggctgataaggtgtcttgagtgttgggagatcacatgatcaaaatggtatacacaccataaggtgtccttagacttgagtgtggtgtaagtctactgaataaaatgcagaaatacagttcactgttgcttttcttcctggaaattgccctccccaacctcaaaccagcccccaagtggggcagggtccatctttagaccctcctgtagcacccagcacaaccctaactatatggtcaatgtctctcttccccacttagagctccaagaccagggccttgtttgtcctgcttacccactctacccatttgttaaccccatcttaattttctgatgaatgagcccttttttcattgactcctcctttctctccttctccggagtttatttttcctccaggcccattgctgtctctccacctagagagcttatccacattcatgaaattagtcatcttcatgctcagagtacccacctggatctctccagtcctgtctaactcgtcttagattattaccccctggacatctgtaccttcttgtctctccatcgcctcgaactcaatgcgagtctaaaatcaaatactccttcactcctaactcaggaaaccagttttccctcccttgttggtaatgcttgaaattagctcttacttctcttcttcctcctttactcgccatcccaggtcattcatcaggtcctgctaggtctttgattttcttgaaagggccttctttatgccttccttccgtccccatttccaccaccctcgactaggccttcctcacctcatccggcatcagtgtgagcccttgagaaaccagcgtcctgatcttcaggcattctgcatttcaccccataccaccattagccagtttaatccctcttgctcaaacttaataaatactgagcaagggagttactataacaaacaaaaccagaaatttctatgacttcctgctgctttctgtacccccctaagactcctctacctgattttcaaggttctccataagcaggttcccacctctctgctttcaaatcttctatctgccatacacagttcttgtctaaaacaaagattgttcctactcctgcagccacctaaatcctagtcgtcctcaggccctcctaaaatcctgactaatccaacccccaccgatttctctactagtcccagagacttccctcttgtgcctggggttggtgtcatgcagacacactgtaccttaccaggatttgcccattgttgtctgtgggaactatgctttcatgtgggaactacgagtcttgtcacaaatagagtgtaaatgctttgagattggagactgtaaaatacttcttcatgatctcccactgtgtctggtataagaacccgcagagtaaatactcatatacttgtaggattaattgaaacaactggagactgaggttgtttaacttgtacttagaagtgtggacctccccatcttgattaaaacttcaaaacggatagcaggtttcacatattatctcagcatcacaaaagtagactcaacaaagaaatgagttgacagcaggggtaaggtttacaacaatcagggattattgcagggaaacttgtagcctttgggtgttctaactagttttttcccaaaaagtttaaagagctctcttgtgaaagaatattcttatgagtaactgaggggcacggctcctagactgaaaagtatttgggatctgtcacctcttttctgatgttcctacttctattctttattcttctgactacctctattagaaaagataatactaagaatacctgtcccttcttctcagtccaaatagaagcaaacccaggttgtatctgagatatctgcatattttcttctaagcaattctttgtcctcttctctcccatgctttttctatttcctattttcagcaggctctgaagtcatttataatttttactgcccctcggtgacattacatggatattcatccctgatttgcagattaaagcaccgaatcagagtgaggtgagggttgcccaaggttacacaataaatctggccccaaacaggggtaacccttgagtttctagtctgttgattggccactgacccgtgctgcaggcacacaaaggaagctgcacccacagcagtctgttgtggatggttgctgagctgcgcattcggcattgggcttgctttgtttcctgccaggcccagcattttcttctaccagatcggcaggcttgtgggcttcttcctaggtccctcccctgcactctgaataggaaagctggaagctgtgctttagagaagctttaagacgccgaaagaaaccagaagagtgagcgccagttgtatgtgcgtggtctccatccgcaaagccggagctgggcgcaacagtgttgacttgtaattgatcaatttagatcgggcgcaggccgggggagggcagtgcttttgatttaggctgggaaaggcctcctagtgactatgttcaatttggaggaattcagatgttcttttgttatacaagtgaagctgtgtaatacaaatgaggagttttacttttcctaaatcttccccttatcattcaagtattgaggagttttacctttcctaaatcttccccttatcattccagtattatcagtgagatctggttgtgatttatgtaaatggtggctaaaaaattcaaactactgagggggagaattctcattttacagcttcacatgctgtgctgaactaaataagtagcgtgggatgttggctttgtgacaggtcttttgtcatttttcagaaagcattttgacttgttgatgtcaatttggaacagctgaaaaaatacaggaaaataagataaatacgtacatgttgagggtggggacaaaatgaaggttctgaaccagctgccggcttacagtagccatataagcaacagcagcaatgcaccaacctggtgagtaataggcctgattcactggagagatactagcacctttaatgagtcagatagatgcacaatgggtgtgggagcagttggacttgtgggcacaaagtctagcaagaagctcagacttgcaaacaactgtaggacgtgcaaagcaagctggcattggagcttgccgggcacagctgctcaggaataggcagctggttttccctttgatccctgagattccaaaggttactttcctctttgttcccttcccagggtcaattagagtagaaactgcagatgcttttcagttgagaattttcctagaattctcaaaaatgtgtatgctggcttaaaatctgccatcaagaattctgttaccttgctttaagcctccagttccttccagatgtatggtggaggaggccagagggcccttgttttggggcttcagaggatggttgttatctggatgagcactgtggaaagactgagagagcaactgagagaaagtgggcccctgaatgaaagtgatttcgcaaattttaggcagatgccaccatcagaaactgatattttctgacgtctttctcaccttcctctagagcattcagtccagaaatgaccagcctgtccaaagggggaaattactgatattgatctgttccttagagcagtgtttcagtcttttttttttttttgagatggaatctcattctgtcacccaggctggagtgcagtggcacgatctcggctcattgcaacctccaccttcctgattcaagtgattctcctgcctcagcctcccaagaagctggaattacaggtgtgcaccaccacacccggctaatttttgaattttttatagagatggggtttcaccatgttgccaggctggtctcaaactcctgacctcaagtgatcctcctgcctcggcctcccaaagcgctaggattacaggcgtgagccaccatggccggccttcagcctttgtgatattaaagcacagcaacacatttcccattacacccctgaacacacacacacagaaaacccaaaagtttcacaaaatgattcttgctcttactactctcagtacactctgtatttaaaaaaaaaaatgctggttgtggcttcctaagtggtgcgtgcagttttcaaatcaatgcccttggcgataaagtgtgccctatactgattatctctggacaaagtctgaatggggcttggctctaatctctagtcctcattggacattttacatacctggcctttgcctccaccctgatgtggagtgatcatgggggtgggaaatatagctggatccgaaagctctgaagtggggatggaggtgtcacagctgaggctaggcccattctgcagggcactcagtgtgtacagttggttttctatcaggggtcaaccggcggggggacttgagaacagatctctgggcacaaagcagggcctttgccctggggcttgctatgtggctcagcctacacggctctctccccgtcagtcctgtccaaagcccaggaaactaatgtaccacccccgaggaagagagcctacctttccatccaaggaagtgttttacctgtggtaagcacgggggacagaattcttgaggaaggagggtgctgcgtcccagtggtggaggaaaagagaggacctggtgtaagcagccatggcatggacctcatccgaggtggcacctggctagggtcctgacctccaatccttccccagtaaccatcactttgagtaaacagtggctccacccccggcatggttctttgcaccaacatttggggaatgcctaccaggggtcacacactgagctggatgctgagtgtagggtgtccacaacatcgtgcctaaaaagtctctgtatggggtataagaaggtgctggggcaatacagatgagatgagaagcatctttcagggaatgggttgatcccaattcaggcttcccagagaaggatgtctgtagacttcatattagcaagggaggaaggtagccaggccacaggactgctggtgtaaagaccagggcatatgaaatggcaagtgtgactgtgctttcagccaataatttggtattgtcaaatgatgggaccaaacagctggagaggcagatcctaaagggtcctgtgggccaggctggacttcatcttgtcactaactaatggagaggctctgaaggagttaaaagagctcagtttgtctcgtggttaaatccaagttttacaaaggtcacgctgactgtaaagtggaaggtgggctggccaggggatcatctagtctgggtgagaagtgatgataacatgaaggggtgaagagagatttagaagaagtgattcacaggattaaacatttaaataatggaagtggagaaaatggggggggcggttccagatttcaggcatagatgaaagaagtgcagttaggcacatgtaaagagaaacaggaacagcaggttttaggggagaagataacagaatgggtgagaaatgacacttgagtaccctagtgtgctaggtaatcatctgtctacttcccttcatttgtcatgtatattcccatttaatttgcataaagacttcgagttaaacggtcttaccccaatttgtcaaatttctgcgcatgatatggtacaagaaaccgtaagtggctaaggcggcattggtgttcaaattgcctgactacaaaggcagtgcttgttggctacattctgttgcttcccagtttagaacatgttacattgaggcgcctgctgcatttccaaataaaaaagtacagaaagaaggtggctgtataaatctggggctcacaaagtaattttgattactgagagtttgctttcaaggagcaaactgtgactccttgattatgaaccttaatttaaaaaaaaagaaaaaagaagtcttactcttattcctgccttgtctggggcaagccttaatggatttttactgctgtgaattttcttttcattgaagattttgccttgatctatgtatctgctttcatcctgaccatattcaagtcagtatattcatgaatgtacctgtttgtgaaatttgaacttaagtatacacgattatagccgtttgggaagcttttttttttttttttttaagagtaggagtagaaaaaggtctctgtactctgaatgggaagacagtgtaaagcaattttttcccttttcctgtcctcctttaaaaaaaataaacagccgtatgcctctgctaagtactaactacctcatcaccttttgtgcagacagggcaggttacatttggttttaaggaattaggaatatgtttctttccagcaccttagtaacccacgcgattgtgattcttttctcttcttgactgtgataggtggcatggaatattcacatgggagagccgcatgaggccgcccaccacgcttcctgaaggatgcccgtgtggaagaattttgacgtgccagtgtcctcgttctacagggtgttccattcttccgcaatctcagaaaaatgggactaaaagaaactattttgtaaaataagaagacttccatttttaatgaccaacatgtattaagatggacacctactctacgaaacacgaagttctatggtctcgaagaagcccgtgcctgtttaaaactgatcctaactaaaaacagacttgagtggatatgagaatgttggttagtggcagaagagtcaaaaaatggcagttaattattcagttatttgctacttgttttttagcgagcctcatgtttttttgggaaccaatcgataatcacattgtgagccatatgaagtcatattcttacagatacctcataaatagctatgactttgtgaatgataccctgtctcttaagcacacctcagcggggcctcgctaccaatacttgattaaccacaaggaaaagtgtcaagctcaagacgtcctccttttactgtttgtaaaaactgctcctgaaaactatgatcgacgttccggaattagaaggacgtggggcaatgaaaattatgttcggtctcagctgaatgccaacatcaaaactctgtttgccttaggaactcctaatccactggagggagaagaactacaaagaaaactggcttgggaagatcaaaggtacaatgatataattcagcaagactttgttgattctttctacaatcttactctgaaattacttatgcagttcagttgggcaaatacctattgtccacatgccaaatttcttatgactgctgatgatgacatatttattcacatgccaaatctgattgagtaccttcaaagtttagaacaaattggtgttcaagacttttggattggtcgtgttcatcgtggtgcccctcccattagagataaaagcagcaaatactacgtgtcctatgaaatgtaccagtggccagcttaccctgactacacagccggagctgcctatgtaatctccggtgatgtagctgccaaagtctatgaggcatcacagacactaaattcaagtctttacatagacgatgtgttcatgggcctctgtgccaataaaatagggatagtaccgcaggaccatgtgtttttttctggagagggtaaaactccttatcatccctgcatctatgaaaaaatgatgacatctcatggacacttagaagatctccaggacctttggaagaatgctacagatcctaaagtaaaaaccatttccaaaggtttttttggtcaaatatactgcagattaatgaagataattctcctttgtaaaattagctatgtggacacatacccttgtagggctgcgtttatctaatagtacttgaatgttgtatgttttcactgtcactgagtcaaacctggatgaaaaaaacctttaaatgttcgtctataccctaagtaaaatgaggacgaaagacaaatattttgaaagcctagtccatcagaatgtttctttgattctagaagctgtttaatatcacttatctacttcattgcctaagttcatttcaaagaatttgtatttagaaaaggtttatattattagtgaaaacaaaactaaagggaagttcaagttctcatgtaatgccacatatatacttgaggtgtagagatgttattaagaagttttgatgttagaataattgcttttggaaaataccaaatgaacgtacagtacaacatttcaaggaaatgaatatattgttagaccaggtaagcaagtttatttttgttaaagagcacttggtggaggtagtaggggcagggaaaggtcagcataggagagaaagttcatgaatctggtaaaacagtctcttgttcttaagaggagatgtagaaaaatgtgtacaatgttattataaacagacaaatcacgtcttaccacatccatgtagctactggtgttagagtcattaaaatacctttttttgcatcttttttcaaagtttaatgtgaacttttagaaaagtgattaatgttgccctaatactttatatgtttttaatggatttttttttaagtattagaaaatgacacataacacgggcagctggttgctcatagggtccttctctagggagaaaccattgttaattcaaataagctgattttaatgacgttttcaactggtttttaaatattcaatattggtctgtgtttaagtttgttatttgaatgtaatttacatagaggaatataataatggagagacttcaaatggaaagacagaacattacaagcctaatgtctccataattttataaaatgaaatcttagtgtctaaatccttgtactgattactaaaattaacccactcctccccaacaaggtcttataaaccacagcactttgttccaagttcagagttttaaattgagagcattaaacatcaaagttataatatctaaaacaatttatttttcatcaataactgtcagaggtgatctttattttctaaatatttcaaacttgaaaacagagtaaaaaagtgatagaaaagttgccagtttggggttaaagcatttttaaagctgcatgttccttgtaatcaaagagatgtgtctgagatctaatagagtaagttacatttattttacaaagcaggataaaaatgtggctataatacacactacctcccttcactacagaaagaactaggtggtgtctactgctagggagattatatgaaggccaaaataatgacttcagcaagagtgactgaactcactctaaggcctttgactgcagaggcacctgttagggaaaatcagatgtctcatataataaggtgatgtcggaaacacgcaaaacaaaacgaaaaaagatttctcagtatacacaactgaatgatgatacttacaatttttagcaggtagctttttaatgtttacagaaattttaatttttttctattttgaaatttgaggcttgtttacattgcttagataatttagaatttttaactaatgtcaaaactacagtgtcaaacattctaggttgtagttactttcagagtagatacagggttttagatcattacagtttaagttttctgaccaattaaaaaaacatagagaacaaaagcatatttgaccaagcaacaagcttataattaatttttattagttgattgattaatgatgtattgccttttgcccatatataccctgtgtatctatacttggaagtgtttaaggttgccattggttgaaaacataagtgtctctggccatcaaagtgatcttgtttacagcagtgcttttgtgaaacaattatttatttgctgaaagagctcttctgaactgtgtccttttaatttttgcttagaatagaatggaacaagtttaaatttcaaggaaatatgaaggcacttcctttttttctaagaaggaagttgctagatgattccttcatcacacttacttaaagtactgagaagagtatctgtaaataaaagggttccaaccttttaaaaaagaaggaaaaaactttttggtgctccagtgtagggctatctttttaaaaaatgtcaacaaagggaaaataaactatcagcttggatggtcacttgaatagaagatggttatacacagtgttattgttaaaatttttttaccttttggttggtttgcatcttttttccatattgttaattttataccaaaatgttaaatatttgtattacttgaattttgctcttgtatggcaaaataattagtgagtttaaaaaaaatctatagtttccaataaacaactgaaaaattatcatgagatgtgtatttaaactttttcatgaacattgcttatataatcattccttctgtcttaatgtactacatggtcttagccctgttcctataggattatcatgttctctgcattatagagccacctaagatgtactttttgttaaatgactcatgctggaatatctggatggggagatgttctttcctaatgtagtcatgtgccacaaaatgacgtttcggttaacgatggatcacatatatgatgatagtcccatgaaattgtaatggaactgccctatacaggtgtaccattttttatcttttatttcagatttttactgtaccttttgtatatttagatgtgtttagatacacaaatactttccattgtcttacaattgcctgcagtattcagtacagcaacatgctgtacaggtttctagcccaggagcaataggctctaccatatatctaggtgtctagtaggctattccatctaggttctcgtatgtataacctgggatgtttgcacatcgatgtggtcacctaaagatgcatttattggccaggcgccatggctcacgcctgtaatcccagcactttgggaggccgaggcaagtggaccacctgaggttaggagtttgagaccagcctggccaacatggtgaaaccccatctctactaaaaatacaaaaatcagccaggtgtggtggcacacaccagtaatcccaactactcgggaggctgaggcaggagaattgcttgaacctgggaaagggaggttgcaatgacctgagattgtgccactgctctccaacctggacgacagagcgagactgtctcaaaaaaaaaaaaaatgcatttctcagaacttatcctcattgttaagcaatgcatgactataatctgttgagagagggatgaaatcacctgtagttatagcgctttaagataccatttgaaaaggttacgttttccttttctttgacacggttagctgtctgaaatacagtcaattttaaccctaatctcttaatatcaggaatgcccttacacctactttggagtgtctggtgcttcgatatagttgcatgtaatgtgctctcatctgtttttacctgattcctgctcagttcttcacatggcatattgtgtaactcaatctatatttaaaacttgtaagcatccgaattatttgtttatggtagaactttttacttgcaagtcgtggtaggagtgtttgtagttggtactaaaatgtgatgacttggaagaattaattaatgacctatatttggggactttaattggatgctatagctgcaatgagaatagaaccagagaactcttgatatgcaaggttattcattctgtgataataatgagaggaatattcgatgtctctttgagtcagttttccttccgatcacttccgcattctgcagtgacacaatccttaatcatagctttcattacaatattcctttactccagacctcaaagactcctcactgcctccagcatcaaatctaaactcttctacctggttttcaacgccctacgtaaacttttcctccttcattccctatagcttggtttttttttttttatcactgccactattatctatcacaaatgtcaatcatgaccataccttgcttaagttggtttcccttgccaagagcactgtttttcctatacctgttgaaattttggaaatccaattctacctcctctcttcccttaagcatctcttccttcccttctccccaaatttatatttagtcacatatattatcgtactacctactaatcattccatgtgtttttttacgagctgtaagttctgaaggcaaccatgccttgtacagtgtccacttagggttctgaataattaatcatctccccaaaatctgaaagccttctatataccaagcaaatttgtttagttatgcagcaaaactcaaatctataaaatcaaaaaggaataaggaaatacagattaaacagttgcagcaaagactggtgatcttaaggtatttagtcaaagctggtggtagaacaaaaacagtagtcttacagattctacctcttgattaactcagtggctaattttgccttttctcaaagttcttttgcaagaacataaagatatttttgtttctttagttgagtgctgtaactttattcctttgtgtttctcataagtatgatttggcagtctgccatacgttttttgttttttttcttcctctttgagacagggttttgctctgtcacccaggctgcagtgcagctgtgtgatcacagcttagctcactgcagacttagcttcctgggctcaagcaatcttctcacctcagtctcctgagtaactgagactacaggtgcaccccaccacatcccgctaaatgttttaatttcttgtggagatggtgtcttcactatgttgctcaggctggtcttcaactcctgggctcgagcaatcctcctacctcagcctcccaaagtgttggaaagtgttgggattacagacctgagccaccacacctggcctgttataagttaatacaataattcatcaactaacttaaagaacactaagactcttacaaaagtaggtatgagttttagtaaaagtctcaaaagataaactgtcacttaaggaaaactagagaacatatcattgccaaatggtgtttttcagagattataccattcaacgcccacatgctgaattgggccattcattataactccaggaacatggcaatcagtaagagcccacatgtttctttgaatacaccgtaagtgaaagaatataaagtagtctagttaatattatgtttaatcaaggagcacattcctaaagatgtttgttcattcattctacagacatttttcagaggcctgctaagagtcaagcattatgatagacgccatggataaaagcttacaagtcaaccagcgtgggtataaataatgtgactagcactagaacaggtatcatgatggggattctgagtataaatatttttttaaaataaatttccccgtgttatttttggcttttacctccctaatttaggctttctaaatggcacagcatttctgaggatgcaaacacctttctacagagcaaaaacagcatttgtataaatttgtgtctttggggaaccaagagactttaaatgtgtttaaaccaataattcagtcaatatcaacattagcttacatgtaatattctcttgatagcccaattttttaaaacactgtattcttagaagtttggtttctaagatgtcactttaagctcttttgcttgttgcttttgtgggatccacaaattttgttctcaggtacataaatgaaggttagtatagaggataaatattatgattcttatctgggaaagacaggtgctgaggtgtaaaagagaggatcctcgccacccatgccccgcaccccctcgccccctgcacccacggatgtgcagtcttacctgcggggggaaaggtctccgagcctggcctgctgctccagctcagggttccccctttcatgatggctttcaaagatttcttcactctgaagtgaaagaaattttggtaagatttgatattgtagggacctcctaatctatatttttctctctcccaatttctgtgtttgattttggttttgagtctctcgataagcaaaatatccagtttctcatgccgctttctcaggttttccccagccactctggatccattatggtttgccctttttggcttcctttaggcacactaaaaactccttcccaaaagcaggtatcggccgggcgtggtggcaggcgcctgtaatcccagctactctggaggctgaggcaggagaattgctcgaacctgggaggcggaggttgcagtgagccaagatcacaccattgcactccagcctcagcaacagagcgagatgccatatccaaaaaaaaaaaaaaaagcaggtgtcctttccccttaatcatgaagggctattcatactttactgccccacccctattgattcataagaggacagtaaagcgatcactgcattcaacatctcctttttttttttcttgtaagaaatcaaggtctggaaaagttgcactcgccctgagaccagaaagtgctggaggcagagatgaagtaagcccagtgtaggctttcacagatgcgtgataacaagtctaactaaagaagtacctgggatactagttttgccaattcagctctaaaacaatatggcaatcttatattccaaatatatatatatatatttgtatttatagtagagatggggtttcaccatgttggctaggctggtcttgaactcctgacctcaaatgatccactgacctcagcctcctaaagtggaggaaacatatatatatgttttccttttaaaataggatgtcagtccaataagaatctaaattttagttccctctaatatatatatctgactagggaccagataatatttttcatgtgtcaatatataaaagttggccaggtgcagtggctcatgcctgtaatcccagcactttaggaggctgaggtcagtggatcatttgaggtcaggagttcaagaccagcctagccaacatggtgaaaccccatctctactaaaaatacaaaaattagccgggcatggtggcaggcacctgtaatccagctatttgggaggctgaggcaggagaatcacttgagcctgggaggcagaggttgcggtgagctgagattgcaccactgcactccagtctgggcgacacagtgagaccctgtctcaaaagaaaaaatatatatatatatatattttttattatattgtttattaaacaaataaaaataaaagatatctcatcagttacgatgtaaatgaaaaaattgtgtgtgtgtgtgtgtgtgtgtgttatgatgtacttcttgtgagttgtggtcaggctttgaaagccactatgtatgtgtgtgtgtgtgtacataaaagtaagtatcagtcccaggattcaaattcgaaccagtcccagtcaaattcaatctaattattttcaccacactaccaaaagtctttcttcacattttctatataaagttgaactaattaatacagcagtgaatgttacattgtatccttttgcagtttctcatctatgacattactatgcctgaattccccactggactttgaactcagtcttactcatctttggatccccagcgtgtaatacaggcccttcataaagagtgaccattattactaacaaaatttcctctcactgtgaaacctgctcccaattataaaatgaattgtgctctttcgaactccgttgatctattgtatgcagggtggatcatagagtcttatttcataataacctagtgatggaaaaataacaatgattcaggagtaggtaatggaccttgtcatcttttacactgaatgatgagatttccctaatttatagattttgtcatgcatgagatgccctcaggagcttgcagaaatgccttggcacgttgctctgctgacatgtgtcagatggctggtgtggaggtagagggagtctcctctgccaagcaagtctaatggaatataacactggtgccattgaggatgcaatgagaaggacccacagcagatccagagactgcattcataaaagctgcacagtataccatgttttattaaggtatagacagattagttgtgttctagcatagtggttttcaaagcctgaccacaactcacaagaagtacataacacacacacacacacacatacacacacacattttttcatttacatcgtaactgatgagatatcttttatttttatttgcttaattttttatttcttttttttttgagacgaaaggtgaattgtagccaaagtacttttaggaaattttaaaattacacattttgaaagctctaggaggaagagagcatattcaagtaaaacctttcttttattcaaatagtagactaaaaaattgaccatagactaactcagcaattgctgccatatttcttagtgagggattccttatgagctccattgaatgataaaaggatactcttccaaatcagagcaacaatcgtttcttgtgacactgcatcctttttcccttccttcaccctgaattgcccctagggtatacctaggagagggagggctggcaaccagctgctgttgtgaaagggatgtcattcatggcctgccctattgggaggccaatcaggcggaacagcccctctccccttatggtcattttatcctgaagaaaaagggtggcaaaaagatggcaaaaaagattgctgatcacagatcactgttacaaatacaacaattggctgggcatggtggctcacgcctgtaatcccagcacttcgggaggccgaggcgagtggatcacgaggtcaagagttcaagaccagcctgaccaacatggtgaaaacccgtctctactaaaaatacaaaaattagccgggcatagtggcgcatgtctgtagtcccagctactcaggaggctgaggcaggaaagtcacttgaacccggaggtggaggttgagtgaaccaagattgtgccactgccctccagcctgggcgacagagcaagattccgtctccaaaaaaaaaaaaggagggggtggcaatgagacagggaactgctctgggtccaactcccctcacatagccccaacccccatatccaccccacaaacctccacctccccacttccagcctctccagtttcaaagtgacgcttaccaacacgcaggctctccaggagcaccttgaaaggtaacttcttacatctttccaaaacacttataatctaattgttctttctcccctatattttgaagaaatgcatgctctcaaaattgaaaaaaacgcctagaggaattttgtaaaaaaattatatttttccagtttctccaaaggacatataaaccctttttaaacttagattttgaaaagtcccaatagctgattttcaatcgattattgaaattgttttttttttcttccctaaaggggagataccaacctttgaacaaaattaaattaacttttccccaaagttaaatgattttactttgtgattttaggaatgtgtagaaagtgatttcagttccaactcttttaaagcaagggtatctgggccaggcgtggtggctccctcctgtaatcctagcgctttgggaggccaaggtggggcagatcacctgtggtcaggagttcgagatcagcctggccaacatagagaaaccccatctctactaaaaacacaaaattagctgggtatagtggtgcgcgcctgtactcccagctactcgggaggctgaggcaggagaatcgcttgaacccgggagacggaggttgcaatgagctgagatcacgccactgcactccagcctgggcaacagagtgagtctctgtcaaaaaaaaaaaaaaaaacaaacaagcaaacaaacaaacaaaaacaagggtatctggtaatttaaggtgaaagtattattcactattataatcaattttcttaaaaacaggagctattaggcccaattctgaggagagaaaaaaaagcagatttcaagggcccgtgccaccttctttgtttaaagcatagagaatgataataaaatgttaaaggttcagcattttctggcattgtaaatttaattaattaattatgtaaattaattatggaaatgagaaataaagtgaaaaggtatgtcaagtaagaatcaataattatcaaaacgttctctaccaaatgggatgcaggggagaagggtgagaagaagggaaggaaataaaggcaaaggcatttgcccacagcctcagtccagggtgttctacatgacgcagccccagagtaaaaaatactagccacaggaatgagtggctctgtcttcctctccagaactgacgggcaaaagagggggaacctcaccttttttttttttttttttttggaaactcactgggttttgatatggagaacaggaagagaatctaccctagcagcacattcacagatggtttgtctgccctatttgctccatctccctggctcttcctagcacttcttttcctactttccattttcattggccgcaaaagccacttaaatattcctttggaaaactgggcagtctgtcccctttttaaaaccacaactatttccaggagagttaaagggctttcggactgcccatcattcatgcattgtggtgaactagctcagactgcctctacctttagtccagatcagctgccttgggagggcgattcctggaggaaaggatgaggagaggaaggttttaggacatcgtatggactgaagccccgttggaggggaagggcaggcttgaggaacaagcctcagtgttcctgaggctttgtggaaatgagaaatgaatagagaaagataagagactggatcctaaatgcaattttgcctatttcaaaattttcacagggtctttttttttttttttttttgagacaaggtcttgctctgtcacccaggctgaagggcagtggtgtgatcatagcttcctgaagcttgcagcctcgaactcctgagctcaagcgatcatcctgcttcagcctcccaaagcgctgggattacaggcatgagccaccacccccagcctcagggtctttttaatccctaagatcttaaatttcccagctactattgttagtaatgagttcaatttacttactggttaaattggcttttattattattattatttattttattttattttattttatttgagacagagtcttgtgctgtcgcccaggctgtggtacagtggtgcaatctcagctcactgcaagctctgcctccctggttcatgccattctcctgcctcagcctcccgagtagctgggactacaggcacccgccaccacgcccagctaattttttgtatttttagtagagacggggtttcaccatgttagccaggatggtctcgatctcctgacctcatcgtctggactaatactctaaacgctattggcaatagtttgtttacaggaaaaacatcttcttataaagctgactgcaaatgttttaataaatttgcaaatatgtaattctgtttaaaatatcaggaagtgagaaacatgttatgtgataactctttcccattcccgaaccaagaaaatgtaaaggcagtaagtgtgccaaggacactgaaaggaagctgcccgtacatctttgaatcttctcaggctgtttggtttcatctgattttaagctccatggataaatttcattgtaacaatttttatgtctgtaaatcttaacccataaataaaatcacaaatcagaaaagtactttattaggccagtctttgtccaagcaaatttggtcccaaagctagtttacaaataattgccacacagctacaaggccagtgggttgactatcgtagcatcaatggtgtgggcagggctgcagcctctggggcagcattagccccaactgacagagggtataggtgctcttaacaatctatgagaccccccacaacctggactcagctgtcataagcctttacttcttatgttcttcctaagtactttatcgggccaacaaattcatcccatgaggaatccaagatggaaacgtcaaaactatctttggtatcatgcttcctccccctaccttctctgccttgatcccctccttcattctacacattttctctgatagtcgtgttctagccactagggagaacgtttcagtcaatgggtatgatttctgctcacctctttttgccatagctattagtaagctctcaccactgatgtctcagctgactgtgacaactgccagcggctggtcagcctgcctgccttcatctaacctgctctttactgtctaccagagtcagcttcgtaatacacaggtgccctcctcctcctgtcaacattcctcaaccaaagcctcagtaaactgtctctcatctaccttcccagcattcttgagccattcccaggatagcctaggccctttagacctctgagatgttatacccttcctcattctggaatgcccttcagtgtcttacccacctttcagagttctatttattctttttttttttttagatggagtctcactctgtcacccaggctggagagcagtggcaccatcttggctcactgcaccctctgcctcccaggttcaagtgattctcctgcctcagcctcctgagtagctgggattacaggtgcccgccaccatgcccagctaatttttgtatttttagtagagacgaggtttcaccatgttggtcagtctggtcttgaactcctgaactcaggtgatccacccacctcagcctcccaaagtgctgggattacaggtgtgagccaccacgaccagccttatttattctttagagttgaattcaaatgccacctcctttgaaagccatccttgatgtccttgtgaggaattactttctctaccacattatatattccttttactgtagaaacgtcattctgctttatattataaattattagaaatatgttgtttcccccatgaaagtttcaagtttcctgagtttaggcctgatgatacaatcattttcatatgactcacagcaattgccttagtatatattaaattgagctgaataagccatgtacccagttgaacacaccaaatattttagtgatgtcatttctttattggtgaaagagcaaggccaacgttgatcttaatgttattctctcttttatcttattcagctccctcaacaaaaatacattctcatagattaatgtaatcaccacctcactcctctcaactttagaccctatactagcctgagaaatccagatccaacttaatgagttctcctttatcccaagtcctcatgacctataaatgtaacctctaggacaatgttacaaagagtgagatctttataccacctgcattcttgtcaccaaacgtgtaagttaaaaattcagattctgagtgtggtgactcacgcctgtaatcccagcactttgggaggctgagccaggtgggtcacctgaggtcaggagttcgagaccagcctgggcaacatggtgaaaccctgtctctactagaaatacaaaaattagccaggcatggtgacaggcacctgtaatcccagctactctagaggctaaggcaggagaatcacttgaacctgggaggcggaagttgcagtgagctgagatcactccatggcactccagcttgggcaacaaagtgagactctgtctccaaaaaaaaaaaaaaatttagattccaggacccgaccctacacctccctaattagaatctcagagagtggggccctgggaatctgcataattcataaccttctcagagctctggtacacaagaaaccatgagaatctttgttctggaaacttcagagaacttggctgagggccaccccaggatttggtggcgtccctgaatctcccattagctctgacactgactagacttcaaatatcacagaaggcaagcattgaagtgtgtttatattcaaatagttttcttgttgagaatcagaaatattaataaaacttttgggagtcaaagtaatgagaagacaaggaactgaacttgccccctgatctgttatcatttggcagtaaggtacatattcaacaataggataattctgtataagacctgaatctgaccttctttcatctttcacactgacaattctgtctctaaacacaggattaaatgaggaactaaaattcaccaagatcctgctaggtgtcaggtacagtgctagctgcttccacacatttctcatttaatcagccacctgtgaaattgctatgatttatcaccatttggcagaaaaggacatttagggcacaagagattaaataagctgctggttgggtacattaagtattaataaataatcagatagataagttaggtagttaagtaagctgccagattagtaaacagctagtttcaaatcccagctccaacatttactagttgtatgacccttggggaaactcaacctctgagtctcatggcactgctgataaaacggaaaacatcatcctcacaaggttctgaggactagggatggactcaggtacacacagcacccagtacaatgtctggccttcagccagtgatagcaacccttcactcacctctccattcccttccagcccctgcattcaaaaacttttatttatttatttttttaatttaggaggctctttgctcagaatcctgaaaaggcttttgttactttattttttcttttttttcatcttctgggagcacagaataggcttctgctcctttaaataactttaacaggcaccaaaggaacactgctagctctttcttaattctgtaggtccacatttaggaaaaagaaattgtcagcctctgacttatttccagcttacaaaaaggctgtgatgttggcagcccggggaaagcagttcccgtgagtcatgctttcacctttcagccagtgaagaacaggaaatagtcacatcactattgccaacaagcacagcgaatcgcttccaccaccgggctttcccagatgacgtcagtgagccaagtgcagggcatcacccttgccagatggccccggaagagtctcagctgccctgtcaagtttagcttctcaagctccccagaaccagcatggcaaggatcacccctccagaaaaggaaatgatttctctgatcatgatcaaaccatgtcataattttagctgtaggtggtgagtatcagtgactgtattatagatggttttggttcacagctattttttttctcggtatatttactctcaagggcaaaggggtggcatttatcacaatgctatgattcactctactagactggctgggtttcatttcatctttgagttctagacctaaggccaaaaggatgtcagaatcgccacccagagctagatgcatgctcaatgcaacctggccatctctctcggacagtggccactaaacacaagctgcaatgattattgttgatgttagtcaattgatttgtcccccttttaataatccatgatccacacagacatgaatctaaaccttttttttgaacctatctttttcttactagttttcttacatattttggaataacaatttccctggttataatacacaatgtgtgaaacactaattgcatttattggtcctaaattcattcccaagtctaggatttggggatttagtgcacaaatccactttcttcctgctcatgttgttcatgactttatggattctgcttacatttcctcccaaagccttggtctttctaagcagaaatctgaccagcctctgttcctactctgcttcctccaccaccttgactgttaacatacactgttgtgggagaagcttttcattaaatacgcaaacaaatcaacaataaggaagaaaacaactgaagcacagaaggatgattgtaacatggacttgtgcttgtttaacagtacccatactgtttggtgagttgcctaaatacagagggagatggcaacttaacaggatgggtttggagtctgaattaaataaacaacatggcaaaagaaggaagaaaccaaaagttgggtgactagggcttcttggattctactcaacactttccacacctacaggcctctgattctatccccaccgctgctcctacactgtctatgtttctcttttacaacaacaacaaaaaaatagcacttgtttactgttcacaattattgaaataaatcactctaatttggattcctttatatgagaacttccatatgcttaaaactcccgtagcatttttatagtgtacaggtcataaacatgttgtctgaagatgggcaaagtaggtcgtagagataggaagtgagttcacatcacggcgtgagtcaaggcagcagcatatgagctcaggggccaaatctgagctgtgatcatgtgacacagtcctcaccttcagagatgacattctcccagaagtccagggtgcagaaatggataggctgatgttcacttttgaagaggaccacaatgaaacccttttaatattactcaatgattccacagacctcctgggtgttaaatcaggtgaatctatttttaaaaattgctatttacttttttaggtggctgatcaggacagtatgaaatttcatacagtttcctaacttgagaaaacatggtgatgcaattcctccaaccaggagggatttatggacagcggtggctacgtcctaatctgcccagaatacaggatgactaaacaaattggcaaacggacgcagctttctctctctctaagaaaagtctgctgagaaccctcgttcccactctgtttctgcctccaagaagaaaagcctaaaactcactttcttccggactctttcaaggtcagtggagttcctctggggttcatattcagatactttggggattgatgatggatcataaatgttgctgaagttcatttgagcccatggcctctggtttcagaaccattcagccagtcaaatatttaaattttagtgaggcaggggaaagggaaccccttcgggggctgctatacagcaacttatattcacaattcacaattaaatacacttcagtttctaaatatatgttactttaaaattatacagtgcttagcaattttcaaattttcattttgtgctcaaaatattttcaggaggtagctgttgttatacccatttgtacaagcaagaaactgaggtttcaagaggttatgttgcttaaacccagatctgcctgattccaaaccttatgctttttttaaacttctattttgaaataattatattaagtcacatgaggttgcaaagaaatggaaagtctcatgtcccctttctccaaacctcatccaatgttaacatctaagaaattgacactggcacaatccacagagcctattcagggttcaccagttattcacgcacttgtgtgtgtgcatgtgtgtgtgcagctctgtgcaattttgtcatgctcttttttttttttttttttgagacatagtttcgctctgttgcccaggctggagtacagtggcacagtctctgctcactgtaacctccaacttccagtttcaagcaattttcctgcctcagcctcctgagtagctgggattacaggcatctgccaccacgcccatctaatttttgtatttttagtagagacaaggtttcaccatgctagccagactggtctcaaactcctgacctcgtgatcttcccacctcggcctcccaaagtgctgggattacaggcgtgaaccaccgcgcccggcctgtcatgctctttttatacatgaaccatacactgttctgccaattttaaatatgaaggcagattacagaaataaataaaatgatttttcttttactacaacagtatctaccaataatcacatacatgaccaaatagctttcacttctagctgccgttaagaagaaagaaaaggatgaaaagaaaaaaaatcctataaaccccagttcttgaaagcattagtctgtgctatgtgccttaggtacagattaaggaaacacaatttgttgatttattgataattgtgacagcaatcttccctcttgtcaggaagttctataagtaaaataaaggtaattttaccttgacttcaratttagtctcatcatcttcctttccccgggagttcaactctgtctccgtataaggttcctcagacgttctcagaggacgagctagagggactaagagaacctgccattagtgtggttatttaacttataaactataactcagtgcactttgtctgatttggacaaatagctggaccacgtcaatgtggctaactataaaagctcacttgagctgctgcgttgatttcctagggctggatgaaattggaggtgaaggagagacacagaggagaaatagaatccttgactccagggacttgacatttcagcagaagagaaaaaagtcacacccagcaccatatgaaacattaaactacaacaaatctgtacatatagcaatgtggtaaagaatagtagattttctgtcattcccatttttaaggcccagctaaaaggtcacttttggctgggtttggtggctcacacctgtaatcccagcactttgggaggctgaggcgggcagatcacctgaggtcaggagttcgagaccagcccggccaacatggtgaaatcccgtctctattaaaaatacaaaaattatccgggaacagtggcaagtgcctgtaatcctagttactcgggaggctgaggcaggagaatcacttgaacctgggaggcggaggttgcggtgagctgagattgcgccactgcactccagcctgggcaacagagctagactccatctcaaacaaacaaacagacaaacaaacaaaaaggccactttcctcatgaagtcttccatattacaaactttatggattcttttatgcactgctgctttggcatgcatcatgtgtacagcataatgttgcacttgatgttgttcttggattcaaagactaaattctaggtactacattgtattgaatatattttccattataaaggtaattaatttttgcttattacagaaaatctgaaaaacactaaactcttaacgctgaagcacaatcacttagtatatttccttacagtcttctttcaaatgctctccctctttttacacacatacatgtacacacacaatcatactatgattgtattgtaagaggatggccatgcctgctgctcttgctcttttctcttggccactctatctcccttctccccacctgggaaatatcctttcttcaagctccatggccatttggtagtaaaattgggacttgagaggagaaggcctcaaggcttcctaacccaccttaccagctttgccaagcattgtgggtgatggccacaaggctaatagataagaggtactttgaattcttatttgtcacagtcaccacccttgcatatgctggtcccttgggaaactcacaggagacatgattaatcccaggcaggatttgagcatttctttctttctttctttttttttttgagacagagtctcgctctgtcgccaggctggagtgcagtggtgtgatctcagctcactgcaacctccgcctcccaggttcaagcgattcttctgcctcagcctcccaagtagctgggactacaggcgcgcaccaccatacgcagctaatttttgtatttttagtagcgacggagttttaccacgttggacaggatggtcttactctcttgacctcatgatctgcctgcctcggcctcccaaagtgctgggattacaggcgtgagccactgtgcccagccaattttagcatttgtaggtcccaagaccaaaatgccattcattgaatgccaccaatatatcaccctgattcttagctatggtagacttgatggaggttgaccatctgatctccagaggccccttccaacccttccattctgtgagccaactggaagcagcttgggctttctatgggtttttcatagatgttatgttgaaaatcgcagaaaattacactgctaccccaggttatacatattaccattaatgctgctttgtaataacagacaatcctttgggctcctccctctctgtgggatctctataaagtgagtgattccaggcacaataactagatgctagaaatgcatgcactataatttgtgacaccatgactgagaagcgcctgtccttgacactgtaagtagagtgaagcagtgaaaggcggggccacagaagccacactgccagtgttcaaaccttgctcttccatgcacgagacaaacatgattacagtcacctctgtaccttacctttttcatctgtaaagtagggaaaaatgagaaatcctacagtaaagggctgtgataaggctttaatgagttcatttgtgaagaatgtagatcatatacaatgcataacacattttagctattattgccacatggcactaaaaagttttttcacgttccttatgaacttcagaggtgttagaagttgtagccaaggcatccagctaacaagagtcagagctgaaattccagctcttaagcccctccacacatcttctttatactgtgaaatacaattgcttatcttggcacagactcagttactaaggaatcagacaaaaatgtttgaaaatccttttagtgacttgctggagtccacactcagtagatacttaccaaaaacaaaagtgcaggattgttctgcaaaacgagctagttgtttgacttaggtcaatgacaacctgttcagacttgacaaagacctatttattctgggaaggagtgttatctattatgaaatcttgtatttgaaaagctgagaaacaaccctgtaattcctgctttatttacttgaaacaaacatatgtacctggaaacaacgaatgaggccaagtcatagatgtgaacatagtttagcttgaggacagacgaaaggtcaagagaaccaagttctgtttccaatcatctaagaaggatgtctctgtgtatgtttgggtatgtctgtggtatgtgtgtgcaagtgtgtgagagtgtatgtgtgtggatgtgtgtgtgtgtgtttgcagataaaaattcaggaaagaaatacactaaatgttatcaaggcttacttctaaaaagtaggatacatggtggaagacaagggatcgtaaattgtactaaatggagaattaccaaaacaccccacaattttcatataaacaaaaactgaaagaatttattgctaacaggccaggcatggtggctcacaactgtaattccagctcttagggaggcagaggcaggaggatagcttgagcccaggagttcgaaacctgcctggacaatatagcaagaccccgttctccacaaaaaggaaaaaataaagacaagaaaagaatttgttgctagtagactccccaacaataaatactaacagaagctctttattccgaagagaaatgacacaagatagtaattcaaatctataataaggaatgaagaaccccagaaatggtgaataagggggtatgtacacacacacacacacacacacacacacacacatgcacacacacacgtatgtatttctcttaatttgatacatgactatttaaagcaaaaattataataccatagtgggggattaacatatatagatgtgatatttatgataagaatagcacagaggatggatggggagcatatggaagtatgacattgtagtatgtagtatgatttcctatattttgcatagaatggtatgaaactaattcaatagatcatgacaagttaaggatgcatatggtaatccccagtctggtgaaaaacagtacaaagagatatgataacaagccaatagaggaattaaaacaaaatattaaaaaatatttactaacccaaaggaaggcaggaaaggaggaaaagaggaataaaaagcacatgagacatgtaggataacaaaacaggaactctaaatccaactatatcaataatgatgatggatgtaaacataaaaatctaatcactccaattacaaggcagaggtcacagtgtataaaaaggcaagacccaactatatgctgcctacaacaaatatactttaaatacaaagacagaagaatagaaaacaaaaaaaatatgttctgcaaacactaagcatgagaaaactggaatggctgtgacaatatcgcacaagatagactttaagagtatttctagaggtaaggagggaaggagagacatttcataattataaaagagctaatatatctgaaagacataaaaaccatgaatatgtatgtgcttaatgacagaggtccacaatacacgacacaaacaaatgacatgtacatcctgcccaagggcagtttattccaaggatgtacagttgttttaacatttgaaaacaaatcattgtaatttaccatattaacaaataaagaagaaaaaccatatcattctctcaatacatggaccaaataagcatttgaaaactcaataatcattcacgataaaaactctcctaaaaaatagaaatagaagagaattccctcaatctgataaaagacatctgtggaaaacctatagcttacatcatacttaaagatgaaacttgaactcttttcctaatattgggaaaacacacagatgtctgctctcaccatttctatttgacattgtagtggaggtcccagtcattataatatgacaagaaaaaaagtataaagattgaaacagaaaaaagtaaaagcatccctattcacagatgataggattatatttctatatagaaatctattcctattcttaattatatatggtaaattccattcattatagggttaaaaaaatgttaaatgcctaaggcctttacactcaaaacgactgcattgttgagagaaattaaagatgacctaaaaaacataagttataacatattcaggaattggaaaagtcaatattggtaagataatagttctctccaaattagctcatatatccagtgtaatccctatcataatcccagcagaaattgaaaggtgattctaaaatttatggaacaatgaaaaggacctaaaatagccaaaacaaccttgaaaaagaacaacgttggaacatcgcatgacttgatcttaaaggctgactaataagctatggtaatcaggaccatgtgggattggcataagaacttacctattttttaaatctttgctcaaagaaccaattttactactccattgctaataaaacatgggccttttaaaggtcctgaatggggtctattttatgctgttattattatgttattattatgatgcatttgttgttgttgttgttgttgttgagacagagttttgctcttgtcgcccaggctggagggcaatggcgcaatctctgctcactgcaacctctgcctcccgggttcaagcaattctcctgcctcagcctcctgagtagctgggattacaggcgcccgccaccatgcccaggctaatttatttatatatatatatgtatatatatgtatgtgtgtgtgtgtgtgtgtatatatatgtgtatatacatatatgtgtatgtgtgtgtgtgtgtgtatatatatatatatatatttttttttttttgagacggagtctcgctctgtcacccaggatggagtgcagtggcgccatctccgctaactgcaagctctgcctcccaggttcacgccattctcctgcctcagcctcccgagtagctgggactacaggtgcccaccaccacgcctggctaattttttgtatttttagtatagatggggtttcaccgtgttagccaggatggtctcgatctcctgacctcgtgatctgcccgcctcaggctcccaaagtgctgggattacaggcgtgagccaccgcgcccagcctaatttttctatttttagtagagatgggtttcaacatgttggccaggctggtctcgaattcctgacctcagataatccacccgccacggcctcccaaagtgctgggattacaggcgtgagctaccgcacccggcctttatgatgcatttttattattccttcagtagattgtgtgtttctccttgcatccaggcacttggtgttatctaagtgtttatgtcttccatgtctgcactatgctatatctgtagtttgttttaaatagtatctgttaaaacagcgaccattatccattgtagacaaccagtcacagtcctcatggtgctgatgaaacacaaaagccacaaagcttcttttcctcaaataacctacccgaggtggagggctggctggtttttgatgacacccattttggtgaagactcaggatgtggggccacaggttgcactggacgagtctgtttggctgccagtttcatcagactcacttgcctcttgtgaaatatttcctggacatcatccagcctctgcaaaactttctgggctttggcctacagtaacaaaagcaaatcatgatgaacaggtctctctgtatacagcctgaggacacgaagcattccctttctcccaccttcccctactccccccatccctacctccctcaggtgaccccctctgggcatcactatgcaagtcgctgcaggtcctgccatgctccagaattgggtatctaaggattagcctctcctacttgagacccttgaggacaatgactacatcctttcactatggcgtctccagtgcctggaacaccctggcacaggagtttgagaccagcctggtcaacatggtgaaatcacatctctactaaaaatacaaaaattagccgggtgtggtggctggcacctgtcatcccagctacttgagaagctgaggcaggagaatcgcttgaacccaggaggcagaggttgcactgagccgagatcatgccactgcactccagcctgggcgacagagcgactccatctcagaaataaacaaacaaacaaacaattagaatacaatgtggcttgtgtcatgttagacagagcaaagaattttggcctgagtccatggatggacttcagggcattccccagaattacacaaacagttagacaggctggatataatctgtttgttcctccactgcatcttctcttcctttctttgtgcccaggaagctgattaaaagaagctcctaaaccagaggtgcagacaaggtgatgatgtggctctcagaggaaggtgtgctacctacaaccctgctggcttcatggaagaatatgcttctcaaatgcaaatccaatcaagttatctccctgcttaaatccaaactcgctcatgtggcccacaaagcctaccttgcctgcctctctctaacctcacccaaaacacacttccattgctctctaggttccagcaccctgaccttttggtctgcactgtgccaggctccctccagccctgaagcctttgcacatgctgttcctcctgtctggaaaggctctcccatcttgtctattcgttctccaggctcaagtgactcttcctgagagccttctctgaccccagtccaggtcaagttcctctgtcacatgcctgaccctgcatccctccttgacagcacttatatcagcttgtaacacatttttgtgtgattattttgttaatgtcagcctctcccacaaactgtaagctcagtgagggatggaagcatgcctatttttaatcatcatggtatcctcagcactcagcacagcacatggtacatcaggaatgctcataagcattaatagagaaatgactgatttgagtcagacgaagactcagtatgccaggacgttcaggccgagagtctaagaggccgccggagggcttcggaaccagtgagcccactcaattcagcctgctcagtaccctgtgtgtactttatcaggaagaaggtacagtccctccctcccctatccgtttcccaaccacaggatcaaaataacccggaagcattacctttgcatcgagggtgagcagcaactcaaactcgttgtaaaactccttggggctgagcaacgggtactccttgactgtgcccaggaatgtcgcaatgtcgttcaaggcgatatcaaccccttctcgagactggcacttgtctacagcttgggaagccaagaggtagattcctgcctcacaccattggctgaccttttggaaagaaacagtgccctgtgcacttcgcctgaccacaactcagagccaccgtaatcctcagcaggtctgagcttgtaaggtgtctacaaggattcccagacaatgggaaattgtcatgggacggcatcgagtttaaggggtctaaccactgtaaattacactatgagggggacaaacccaaaccagctgatacctgtccacttctcagggaagtcactcggtcagcaaaatgagtctcttccattaacagtaattgctacatctccaggaggagacagctaaatatatatttaattaaagacagggtttcactctgtcacccaggctggagtacagtagtgcaattatggcttaatgcagcctggagaggtctaccccaggctcaggtgattcttccaccttagcctcctgagtagctgggactacagatgcatgccaccacaccaggctaatttttccttccttcctcccttccttccttccttccttccttcctctttctttctctctgtctctctttctttctttcctttttttgagacaggttttggccatgttgccgaggctgctctcgaactcctgggctcaagcaatcctcccacctcggcctcccaaagtgctgggattacaggtgtgaggcactgcacccacccagccttatagctaaatatctcttaggctggtctaaccatagagaaatgtaatcaatggcttttggggtttacctgctagtccactcttcttgcatccgaattggttaccagaacacagggtgattaataagacattagacctggcccttacatttcctgggagaagggcatgtcccttttaacaaaaacacaactttcatctttggattcccaggtgatccctatttgcatttactggcgtttgtctttcgtaaggaagcaagaatgcaaagctttgtaactcagcacagcgatactcaagagtttctggatgctgggaggacattagataggtgatgagttctaattattcaatttttaaaaaagactcattttctttgctcttttgaactccactgagacacttgaacagaaagacagggagcccttatgctacctgaagagttatatgaaaagaagtttccagtgccaatacctctgcatttccatttaccatgtgacctgaaaagcaatataaagtaactatacagagaaaaaagatcaaaatgcaacacgccaaagtggttgtctttctaagtgggaaaatgataggcaacttaagtttttgtcttatttttttcctagattatttacagtgaatatgtaccacatttagaataataaaaaatcataaagatatttcagaattaataattaccattatgtagggatgggggatagtgggatatgtacgtgcccatgagtaacctttttcttcctacatttttggatttccacaataatatgaactcatgctttgatatatgctgtgaaaactttctctttacacatcatgcccagatctgcaaaaaacattaggctgggattttctgtagagttactatggctacttgctttctctctctctctgtctccctctctctctctcaaacacacatgcacacacacacacacacacacacacacaccaggcttataatctctggagcaaaaatggagttgggaaaacagcagctgatcccacagcgagctcagcacacagagcaggctgcacaccagccccttcggagctacttgcttctgaaacaactatatttcattgacattaaaatccctttagcaatgggatgaggtaagcgcctgggtgggtgccccctgccatgcaagaggaacagctgtggggatggagcatgctgactcattgccgtcagccacatgctgcctgggaccagctcacagggaagactccagaaaccgctgctcctgctgactgggaacataccctagaggtcacctccaaagggcacccctctccttgtgggcccctggcatgcgcccttgctgtctatcctgtgaagccttggtgtggaatctggcaggcctgactttaattctggcttcccctgtgtgcaccatgtgtggtcttgggcagtcatttaccccagggtttcttggtgacatccctgcaccacctgcaccagaatcatttagacactttactaaaatactagttcctgggcagtattccagacctatcgacgctgagtcttcagggcagtgcataagggaatctgccatataacagctcactaggtgattctcgtgtgctacattttgagacccagcagagtatcagtttctgcctctgcacaatgaggccattaataccttcctcagaggttgtcttgaggattataaatagatgacataattatgttcctggtaggaatgcagtaggtgctcgatacatggtagggggtataaaatggttgttattacttaagcttctccaaaaagagtcaaaaccctttgcctttatatgagggaagcactctgcaaatatagtgcttggttctctgtacacctgaaagggaatcaagaagtgttcccacagggccaagccaaaacacactcttaaagtccggctccacacagatagaaatgggcttcagttaactttaatgggatgtggtgggatggccagagcactttttaccttcgtgccaggtatacttctacaccccaggatctgcacagtttttaatgcctctcgaacatcttttcacataaagcactcaagcctctcagcaatcacacaaggaagggaggacgagtatgatggaagcttcttcacagaaaatcttgcagacatcatgttcttggctgtgttttgctcaccttgtccagctgtctatgaaactctaaggactttcctaaaatgtcccattttttcttgtttccattgatgaaatcgtcacagaggtgcctgagctccacacaccggggcctgatggcatctgctgcataatggtggctttggatgagctggtccccaaccagtgccagcagcwgggccttttccaggggctcctgcaaagtgaacacccacagccaggcgtcagaagtcagagcatcatgaggctgagagctgcctggtactgtgtgctccaagcctggagggaggctgtggagatgctaacccaggatgaaggctggagaacctgagaaagctcggaatggttccaggcccaggaagttaagcctggcccagagttgtccacatgctgaacaacagcagtcattcattcaaatacctgttgagttctgggctagacatcgaggatatagtgttaacaagcccaaaattttcagattaatggagaattcagatatcaactaaattacacaaatcgttaaattattacaattgcaataaactctagggcagaaaagcatggagtgcacataataagagattttgaatacccctattaactaaaggaacaagaagagggactgacacctgtccttgaggagagtggggggtgagctgaagttgaaacactggtgaaaattggatttggacaactcaaaggtggtcatgacacttaagaaatatgcttgtctaggctgggcgtggtggctcccacctgtaatgccagcactttgggaggccgaggtgggcggatcacctgaggtcaggagttcaagacgcgcctgaccaacgtggaaaaaccccgtctctactaaatacaaaaattagatgggcgtggtggtaggtgtctgtaatcccaactactcaggaggctgaggcaggagaatcgcttgaacccgggaggcggagattgcagtgaattgagattgcgccactgcactccagcctgggtgacagagcaagactccatctcaaaaaaaaaaaaaaaaaaaaaaagaaatatgcttgtctaaaccctttcccaaagcctgtaagggccctgtctacactgaccctgtctgctcaatcacatttcctacctctttctgcatgacacttcgctctaaccacacgtgccaagttttcctgtttgtttaagcattccttcattcatccttctcatattattgagaacctgctatttgccaaacactgtcataggtgctgggagttcattggtaaagaaagcaggcaaaaacccccacctcatgaaatgaagcttacattttaatgggagacagaggcaataaacaagtgcatgtgtaggtcatatggtatcttagacagtgatgagtatgtggagaaaaattagatggtggggagggcagggagtgctggagctagtattttaaatcggatggtgagacagtctccctgagaaggagtactcaagctatgcagaaaagacttcacatagaaagcctgagactaggccgggctgtggtggctcacgcctgtaatcctagcactttgggaggccgaggcaggcggattgcctgagttcaggagttggagaccagcctcggcaacacagggaaaccccatctctactaaaacaaaaaaaattagccaggcatggcagcatgcgccgatagtcccagctactctggaagctgaggcaggagaattgcttgaacctgggaagaggaggttgcagtgagccaagatcgtgccactgcactccagcctgggtgagagctaggctctgtctccaaaaaaaaaaaaaaaagagaaaagaaagcctgacactacagccttagaaagaaagacccgattttaagattggccctttgttggcatctaggaacttagatttttgggaaggtttcctccattccctgatgtgaatggttcatgatccctgaactgtttgtgcaaacagtatggtttatggtgattacttgctttttcttctgggagtctgaaatcttggtacttgccagacagaagctgctgacatgaccagccaccaataaaacctctgggcattgagtctctaatgagctcccctggtagacaacatttcacacatgttgtcacaacccacagacgggggcaggaagtatgtcctgtgagactcccacaggagaggattctaagaagcttgtgcctggtttcctccagacttcacctcgcatgcctttctcctttgctaattttgcttagtactttctcatcttaatagatcataactctaatacagctacatgcagaatcctcctagtgaatcttcgaagaaatgtgtgcatggtcttgggagcgctctgcatacaagctgagacctgaagtcagggacaagccgtgcagtacttggctgggaggtgaaggcgtgtttgacaagtttgggtagcaggaaggaggccagtgtggctgcagcagagggagcaagaaggaaatgagtggaagactaactagaggaaagagggggttccatagccggggtgagaggaaagcccctgggtttggagggaggatctcgatcatgtttttgaaaggaccactcccggtacagtgtccagaataagaggaaatgcagggagactcattaaggggctgctgcaggaatccagccgagagatacggcttacggctggtcaccaaactagctcctgactcgacccttctctggattgttcttccctgggtcatgcagagctgagttcctgggtcacctcctcacagcgcttccctggcgactatatcttaagtcattctctacaacctattcgcccagtcacctaggccctctcccacactttaattctttaacagcattatctctatctaaaaactattttctttatttactttaatgtagaattcctccctcctggctgggcgcggtggctcacaccagtaatcccagcactttgggaggccgagacgggcagatcatgaggtcaggagatcgagaccatcctggctaacacggtgaaaccccatctctactaaaaagacaaaaaattagccaggcatggtggcacacacctgtagtcccagctactcgggaggctgaggcaggagaatagcttgaacctgggaggcggaggttgcagtaagctgagattgtgccactgcactccagcctgggcaacagaatgagactctgtctccaaaaaaaaaaaagaattcctccctcctccactcactcccaccaaaatgtaagttccatgagagcatttagtaggcatgcaataaatatttgatcaacaaaataaatgaatgagccaatgagctacatgatgcggtgacctgcttggctggaactctgtgaagcaatcagcacagatgactgccacattccaaaaggtctccaggagcagagagcccatgagcccccttgccagccacactaagcatccagtgcatcactgcactgctttagctgtttacagtaacacaaggagtcacggtaactccaggtgcgtacatcttgcccctctcttaacttgcactggtttatggtttcaacaatttccaaacccctttcctcttaccctcccagtcattcacgaagccccgcagggaccgtcgccttcttaatgcctttcaaattctgaccccatctctgccacctccttgtcactgtctgctcaggcctcatggcttctcatggggacaactggtctccctgcttttcttcaggctctccttcaaatcatgctccagactgctgacaaaggagcaattccaacatatcttattgtgtctacatcactcccaagcttcaagccctttcctgggcgcccagggtcttcaggagcaagcttaaactcttgagcaatgcacacggggaatttcattatctagctcatacctgggtgtgcctgacttaccaagtcctcttccacttcctcaactccattctctgctgcaaccatactaattatccacttattgttccccaaatattcaggcagcttcaggcctccatcccttctccacctgctgtctgcctagaaagcccatccttccctactccccctcacccatactcctctggggccaactcgatctaaatcatatttcagacttcaccttctccagaaaactttctctgtgcttctcttgatcagagcacctgcttcattatgttgtgaccacttatctgctgcctgcgctatgccacagacacctatggtccagaaccagctcttattcaactgaaaacagtgcatgctgcatcttaggtacttacaaataaatgctgcacaaaacaaagaggagtactggtatagaaacaagtgacacaaatcaagtagtggctagttaaaaggactgaggcaaaaatacccagaacacttgttctaaacagcaaaggcccaggtgcactggttaccacccctacaagatgactggaatactcattccctgggcagtgattttttttttttttttttttttgagatggaatcttgctctgtagctaggctggagtgcagtggcttgatctaggctcactgaaaattctgcctccggggttcaagcgattctcctccctcagcctcccgagtagctgggactataggcgcccaccactatgcctggctaattttttttttttttaatttttagcagagatggggtttcaccatgttgcccaggctggtctcgaactcctgagctcaggcaattcacccgcctcggcctcccaaagtgctaggattacaggcgtgagccaccgcgcctggtctgggcagtgatttttgactctttggttcactgctgtgtcctcagaacttaaacagtacctggcatggtaggagatgaataaatatttgcagaatagatgtcgaatgaatgacagacctttcctagcactgctcagctaccgcagactgaacctagcacatgttccatagcccagaatttatccctctacctctgtaatgttaataacaacagctaacatctactgagagcttaacagatgccaggcactgttctgaatgctttacatttgcttatttccttaactcttcacaacaaaccctttgatacaggtactgttttaccaaagggaagtggagcacaatggcccaaggtgacccaggtaggaaagagaagagccaggcttcaaacccaggcagtcttgctccaggatctggctcagaccaacatacacagagaaaaatggctgcacttgttctgcctaaacttagagacctcatttggttgctcgaacttgtctgactttagtcaaatatagaaacatgagacttggcatgaaagtctctgttgacactttttttttttttaagtccagctgcctaatttattaagaacagggcagaattttctgggtccagggaaattcaccacaggatacttccaaatcaccctgtggtgatcagagcctgcccttccctcagcatacagtatttcacccttcagaattttccagaagacatttgagatgttagagggaagatgtgtgtaacaggtccaaatgggtctagggagaaacgcccataaaggcaactgaggaggccgggcgcagtgggtcacgcctgtaatcccagcactttgggaagccaaggccggcggatcacaaggtcaggagttagagaccagcctgaccaacatggtgaaaccccatctctactaaaaatacaaaaattagccgggtgtggtggagggtacctgtagtcccagctacttgggaggctgagacagaagaatcgcttgaacccaggaggcggaggttgcagtgagctgagattgtgccactgcactccagcctgggcggcaagagtgaaactccgtctcaaaaaaaagggcaactaaggagcaacccggattcagccaccacatggctggaaggtcactattacagaattgaaaggacaacaatagtttctgaccactgactactgaccaccaaccatattgcaagctgaccacatgaagtccctaccacacatctaactcatttaatcttcacaaggtctctgtgaggcaggaattattacctctgctttacagatgagggggaccatattcagaaaggctacgaaacgtgactagggtcatacagctggtacttgttagagccaagatttgaatccatccctatccgacttccaaagcctgtgttcttgtcaccttccagcccacctggcctctacacatgtgctatgaaatcctcctggtgcctgcaaagaaatttatggtgaaacctccaaattgaagcttatttttttagtttatatacctcccactcaggataaatagtcatcaaaatctccaaagtaaaaaagaaagagtgagggaaaaaatggctaaaatcttctgatcacaagcccatctgggatctttcagatgctgaaaattccagaaggctggatcgtcaagtttcagcttagaagttgcaatcagaaatctttattgaaataagtttatttccccccgaggactctgctggtataacagatgagagatgagagtgcctactagggaagaaagtggcgagaaagcgagtgatgctactctatccgggaatctagaacaaacccacagaggatccacagggatggagtgtgtgtatggggaggtgggccagatgaaacaagaaaggcagaaagctaatggttgttgaaattgaatgatggacacttggagttcattgtgccagtctatctgcttctctgtgtgtttgaaaatttcacacatgtacacaaagccatgaccctccaacaagatgacatccttagatgttaatggcctgggttccatgccttcttagacacagcacccttatggggagaggtcaaggctgaaatcaggtggttcctccaccctgtcctggtctgttccctgctggcccctcagcaagggtctcagtacggcccacagtcaaaaccctgcagcaagttctgcttttatagaagaccttctgtaagtggttgaaactactgtttttcagaatcaggaaggagcattcaaaagactgctaaaccctcaaacgagaacaagataaagaacaggctgaatcagcatgcgacaggagcctggttagtgagttgactgaggttacttgtgagaatgatgtcactgtgtggaataaggaagctggcaacaccccagagccagcgtgtggctgtgctgggagggagctggccccttagtgccgagtaaaggacaaactccaggcagatatttgtcagattgtggccagacacagtcttgttcctttaacactttaaaggacaaatggaaagattagccaagccctaatcatctgaagaagccatgtgtctgagaagtctgagggaagatatattgaaaacgatctcagttacgatgagacagctttgtttgatttacgcaaaggcagagacacaggtgtactacatccttcaggaagcaagtttagaaataagatctgcaagtcataggatgtgacaggtctgcaaatcctgcaagtcacaggtcatccacagtgggctagtctagctgcttcaagaatgttgcccacgaaaggtgggtcatgggttcacagagcattcctgtgttccataaccacaggtttcatccctaactctggtcagcaacttttgaagtatataccaaggaccacaagttcaaggaagtgggcagaagaaagaatgtgatgcagtcatgcagatccatcgccactattcaagacacagcccagagcgccttccaagggctttctgttccactgagaataaaattcaaatcctcacaaaagatctcagggtgcaacaggactacctggcctctgctcatctctgttcactcatttcctcctggcccacctgctctagcaatgttccttgaactcaccaagctcatttccactttaggacctttgcacctgcagctcgctcttgctttgatactattccctaagtctttgcatgattacacagatcaaacagatctcagaccaaaggtcgtcttctcaggcctttccagaccattctagctaaagtagcatccccagtcactttctattatatcttgttttcttttttatatcacttgttactatctgatgttattatttatttgattgctttttagtgaactgtctctctccagtagaatgtaagctccatgagggcagattctggactgtctggctcaccgctgcacccacggaacctaggataaggaatacctcttgatgaataaataaccctctggataggtcagtagctactttcatatatatatgaaggcattttttttgatgaggcactttttcttaatatatgaataagcaaaaaaatatagtatctatattcagtaaaaaattattttgaaaaaactaaaatgatataaggttggggctgtcctggagaatctaaggtatctagtcatcatatatatgaaattcaacttttccattgtttgataaatgttcctgatgactcatgtgtctttagcactagtttatctgtcaaatggtcactggtaagagaaagagcgctcgctgtgaagggatgggattcctgaatggggatctggatacacagctgggtttgtgtgttcatgcatgtgcacaagcacctgcagctcagaatctacaaccaacagctcttagagtcagtgtggccttggtatactttgttttgtatcctttaggggtgtgtgtctccaactttaacgtacaagtcaatcacctggggatcttcttaaaatgcagattccaattccagggtggggtctgagattttatatttctaattagcgcttactcaggtgacatctgtgctgctggccagaggctcacactttggcaaatctctagtactgcaaaattgccgtctgagaaacatgcctccagattagctaagaaaggaagcgctaaccacaggggacttggtccccaagacccaaaaatatagagaacctaatttcaaacaagcagaaaggaacttctctggaaagagacgactcagctttcttcatttgtaataaaccaaatctgtaaacacttaaaatggaatcatttctaaatgctgacttgtgtgcggatctgggacactgtttaattccagtatgggactgtaaaatacatattcttttacaagtttcacatttacaactcttgggacatgagaaaggagaaagctttgccaattctgtgtagcaatggaactaacatggaccaatttcccccatctaattgtcttgctccaggtataaaactagttgtttttttttttctggtttctcctttgaaagtttcccatccttactaccaaccccacaacccccagccccctagtccaggctccagggaggagctcaagctgatgggtgagcctctgatataattgttctggtgagtgatgagcctgttgtgaccttctcccacttggctgctgaccacgtgagagggcagggctggtccagagtcctcacccgacctgagcgtccaactgcaactgtatgttccggcagctttaataggactctgtgctgcccgtattattcatagcagttgttaatgtgcctctctccttgggatcctggggtgactgaagggcaggactgggcattcctgtgtcctttagcaaccttccaatagcaatgactggacatgatccatcattgtccacagcaacctccctcccagtacacaaaaatgtcagaaagcaaacctggcttttttcctccagttttttgtgttccttaagaakctgctccacgtgcatcacgctgtctccaatgcctgtaaactctgcttgctcttccagcaaattatccagggcaagcttagcctacaagaaacattagaacagtccagaagtaaaccaacactcactcacctgaaggtataggtttgttatgcttcaagaaaactcaaaattccaaaaaggattcaagacttgtatatatctatatatgttaaaaattttttttttgcagctcactaactttcaaa

SEQ ID NO: 4 - DNA, 191350 bp, Homo sapiens
  misc_feature (16914)..(16914): n is a, c, g, or t
  misc_feature (19266)..(19266): n is a, c, g, or t
  misc_feature (26334)..(26334): n is a, c, g, or t
  misc_feature (34467)..(34472): n is a, c, g, or t
  misc_feature (38627)..(38628): n is a, c, g, or t
  misc_feature (40555)..(40555): n is a, c, g, or t
  misc_feature (57355)..(57355): n is a, c, g, or t
  misc_feature (61207)..(61207): n is a, c, g, or t
  misc_feature (64980)..(64980): n is a, c, g, or t
  misc_feature (64987)..(64987): n is a, c, g, or t
  misc_feature (81452)..(81452): n is a, c, g, or t
  misc_feature (95893)..(95893): n is a, c, g, or t
  misc_feature (103359)..(103359): n is a, c, g, or t
  misc_feature (117565)..(117565): n is a, c, g, or t
cctgccatggggcctggcacatagtagcctgctctgaatttttgttgaatgaatgaatctcagcaaatttataattttccaataaacaatacttccttcttgagtcacaaagcagccactgcctgtataattctttttattttattcaaattcgtttctcatttgatcctccccaccagcttgtgaggtaatttaatatctgyactcaacagaaaaagagattttctcattcattcaaataagcacctactgtgtgccaggccctgtgctgagtgctggggatacagagctggataagacatggtccctgccctcaaggagtactctgtttaatggaggagatggacaagaaagctcctgttgcagtgcagttggtaagtgctatgacagaggtttgtgtaggtccaagagagcttgactggccagcctcaaagctgtgaccacctgatccaaagtctttcaaattgtagattgctcttcttcctattcttcttatgttctactttcctgcaagcctttctctggccttctggagtttcattgtataaggtaaaataggtgatccataagttcctctctggctttggtagtttactttaaaggccactgtggaagatacaggatgtggagccagatgaatgtggattgggacccctagccctgccacttgttcactgtatgaccttacctttctgagccttgaagtcttcatccctaaaaatgggacaataattgctacctcacatagggtgataagatgatatgaagaaaaagtgcaatagaacaatgtaagagtcaccaaggacaccacaaacagtgccaacttctggctaaaataattgaaaatatgtctgtaatacagaggatttttataatagtaactactagctttttttttgagatggagtctcgctctgtcgcccaggctggagtgcagtggcacgatctcggctcactcgtgcaagctccgcctcctgggttcacaccattttcctgcctcagcctcccaagtagctgggactacaggcacccgccaccacacctggctaattttttgtacttttttagtagagacagggtttccccgtgttagccaggatgtctcgatctcctgacctcatgatctgcctgcctcaacctcccaaagtgctgggattacaggcatgagccaccgtgcctggccagtaactactagctatttatttatttatttagagacagggtctcactctgtcrcccaggctggagtgcagttcactgcaacctctgcctcccaggcttaggcgattctcctggcttagcctcccaagtagctgggactacaggtgtgtgccgccacacccggctaatttttttttttttttttttttttttgtctatttttagtagagacagggtttcaccatgttggccaggctgacctcaagtgatctgcccgcctcgggctcccaaagtgctggaattacaagtgtgagccaccacgcccagccctgtaactaacatttgatagtgctttacaatttcaaagcactttttaaaaatagagatgaggtcgcactctgtcgcccaggctagagtgcagtgccatgatcacaactcactgcagcctcatcctcctaggctcaaccaattttcccatctcagtctctgtagtagctgggactacaggcatgctccaccttgtctggctattttttaatttttatttttagtagagacaaggtcttactgagtttcctaggctggtctcgaactcctgagctcaaasaatcctcccacttcagcctcccaaagtgttgggattccaggtgtgagccattgtgcctgccctcaaagcacttttgtgaacatccttatttatacatgtagcatttcatgaacatgtattatataccaggaaatgggctctgtacaacccagtaaaaaaggtagcagggttttcctgttttacaaagaaaatcacctctcttgtctcaaagaggtgatttgacttatctgaggttatccagctactaaaacatcacttaatccatattgagttttttgacctaaaatttcacatccttttcaccgtgtctctctcttttgtgatcagtgcaawccctggagaatagagctgtgtgtgttctttaagacaacactagaaggaagatatttgggacctttccctagcctgagaaaccatcactgcttgcctggccacagcaaggaggcatgggcagggaaggaccttgactttcctccctagggttcagcagggttggtagtaacctagtcagctctcaggaaccacacaggcttgtgctggttattcagacagattactaaattgttcattagctcccatcacagatagaatagtggctcctgatgacagggacctactcttgtagcatttaaaaggctctggtttggccaagcaccagtggcttatgcctgtaatcccagcactttgggaggctgaggtgggaggatcccttgagcctaggagttctagaccagtctgggcaacattgcaagaccccatctctagccaaaaaaaaacaaaaaaaaaggccctggttccttcagggaaccatctttcttgctgagtctagtagctgggatccaccaattaggttgtacactgtcttcattggctcctggggcacactactcctccttcaggagcatgaacaaccccattctacttcaccaccaccacacactttcatccaactcaaaggtacttcttaagtgcctctctcccttctccctcagaagaaaattcatttcagaagcaaattcattacacatcatttctttcatttttggcctgtggataggagcaaagctgtattcagactaaccgggcccaggtacaaacaacctgtagctcattctacctctgattcatctcttgaattctgtttctgaacaactagccttccctgcctgttaatcttctgagcatagttgtgtttaatactttttacttcctcatttgaggtgacatagctgtctaaggtcagctgtgctccttctttgaggcagaaactgcctttttaggaatcttttccttggtctgaaaccatgaaaatacaaagcatagctgggtgtggtggctcacgcctataatccaaacactttgggaggctgaggcgagyggatcatgtggtcaggaattcgagaccagcctggccaatatggtgaaaccccgtctctactaaaaaaaatataaaaattagccgggtgtggtggtgggcacctgtggtcccagctactcaggaggctgaggcagaagaatcgcttgaactcaggaggtggaggttgcagtgagctgagattgtgccactgcactccagcttgggtgacagagcgagactctcatctcaaaaaaaaaaaaaaaaaaaagaaaaaaaatacaaagccctagttcttgagtatatggaggcatttctgcagttaagggagtgagcagctttggatagtaactgaagttgctcagtaagtcctgagcaaagaccctggtgtccccattgatgtgagaataaaggattctggtgatcaggaccattaaggccagaatctctgtgtcagctgcactaaccttctctcctttccccaggttggtttataagtggttcctgctaatctataaaatcagctatgccactggcattgttggctacatggctgtcatgtttaccctctttggtcttaacttattattcaagtgagtaccctttgtttttgtttttgctggagtttggggaggagtgactgttgagatgtacctcttgttgcaagtcgtggttattaacaggagggacgtaatatccaggataggagacttgggtgctgtggggggatgggagaagacaggctctccatgatttgttctggcagaaagcaaggaatgtctgaatatatacaaagtcagagtcctaaatcatattttccaaggctttatattttagtggaaaagtctagtaaccaaagtaagcataataattatcataacctgctatccataattctatcaccttaacagagctgtttttctcgtcagtgtgtactgttcatttgcagcatccactctgcatgaatggccttacgttcaactaggccaggggttggcaaactgtgccctctgtgccaaatcagcccacaacctgttattataaaatgaagttttactggaacatagtcatgcccattcatttatatattgcctgtggctgtttttccactaaaacagcagagttgaatagttgtgataaagaccatatgggctacaaaacctaaaatatttaccatctggccctttataggaaaagtttgctgactcttgggctagaccgtctacctacatgaccgtggttggctacagctagcaacaaattgacttagaagaatacaaaataaataatagagcagagtggtgtctgcaagtcttcacagtagactcagagcttaggtgtgagggaatgagaygacacagatgggtgtggaagccacctggcctaggagccccattcccccaggaacacatccagtttcaagaatgtcgcagtccagatgtgttgtactaatcacaggtcataagcagtgttgcctgtaatatagctgacattcgacaagatttctaaggaaacagttctggaaagttaacctgtggatgttaagtcctgcttcattgttgggcacttaggttgttttcaatttagtattatcccagataacgctgctctgttgcttcctaagggtgcattcctagggatggaattttggctgttgcttcagttgtcataagccttccaaaagatctttattagcttacaggtcctcccaccccgaattgagtcagatgccaagaaatcctgagctcagagactggagcatgcagtgagtcaatgaggcagatgagggtggaaataatgctttcctggatgaaatactggtggctgtgggctgtggatcaagaggagccctaagcctacgacagtgcactgaagctagagatctaggattcaaatttaagataatgaatgggatgatcactggcctcttccctgagcctagttatattgtaggcaggagtctctgaaaggagtttattttaggacaagtaaaaataaatcctggccaggtgtggtggctctcacttgtaatcccagctatttggaaggctgaggcaggaggactgcttgaggccaggagttcaagaccaagctgggcaacatagtgagactctcaactcttaaaaaaaaaaaaaaagaaagaaagaaagaaaattagctgggtgtagcagtgtgcacctgtatccccagctactcaggaggctgaggtgggagaattgcttgagcccagaagttcaaggctgcagtgagctatgattgtgccactgcactccagctcaggtgacaaagggagacccccatctcgaaaaaaataaaaataaataaatcctattttatatagtgagagtgcactcatgaaattctttcttctaggggtagtacaggctgaaggaataaacaggctcctgaagggtttagaggaattcatcactgtagagtcaaacacatcttgtcaaagaaaacagatatctcctggtaactttctaacctgtatggttaaaaaataaaataaaaatcaagattctgcattatgggattctgcattatggttttttgtttgtttgtttgtttgtttgtttgttttgagatggagtcttgctttgtcgcctaggctagagtgcagtggctcactgcaacctccacctcccgagtagtggggtcaaatgattctcctgcctcagcctcctgaatagctgggactacaggcatgagccaccacacccggctaatttttatatttttagtaaggatggggtttcaccatgctggcgaggctggtttcgaactcctgacctcaggtgatccacctgccttggcctcccataagtgttaggattacaggtgtgagccaccacgcctggcctctgcattaagttttaaagataattcttctataattacagtttctttttacttgcctgaactctacaatgaggaaaacagaattgagaatcttgatcatttttgtgctactgatcaaattaagtggtgtaagatcaatratttctagtgagttaaatattcagggttcataagcaaatgcagctttgtatataaatataatttataactaagcacatacatacggttctttgtacaaatattttaacagataattttctataacaaagatttatagactcaaggttgcaaattatcggtccttggaattattaaaacaaaccttctgatgttataggcaagatctttatccttcttgttaaatagacttggaccaaaatttaactttgatgatatgatacagattatttatatttgtagtttataattttatagtaactgctatatattaataaatatttactaattttatctttttttcttaaacctgtgtttgacaagctgtttctgtaaaggtccaaatagtaaatattttaggtcttatgggacaataggccaaatctaggatatcatgtaggtacttatataacaagagaaaaaactcctaccctgtcccaccctctttgcctggggaaggggccaggtctcaggtagtgggcatgctttgtgctctgttgtcataagctgagacaatctcagaaagaggggcatgtggccaccggagtaattttcagyctctgcaccagtgacacccagattctggcatgccctttcctccttatggatggctcagctgtttcaacttgagtggctagctggaagagagacagctcagcaaggcagctcacttagtgtccagaagttaccaacagtggagtccccactatgtaggtcccgatgagcataggtcctgggtagctgcaagtcattgtcaccagttrggggaggcaaggactaagagcagagtgaggaaaaggggtaggaggggatactgtagcttggtcttcacagcctacagtgctagctagcctcctcaagaggtgttcatgggccatataaaaatagacagcagactsgatttggtcatagtttgcccrcacttgctytagcctttgggccttctcgctttgggccctgccttgtgtgtcccagagtagtaatccatagaagatatgtctcagggtgggtctttctagctctaatgcttcccttgcaggatcaaaccagaagatgccatggactttggcatctcccttctcttctatggcctctactatggagttctggaacgggactttgcagaaatgtgtgcagactacatggcatctaccataggggtaagttcatccgggttcttaaatactgcttcttgacacctccaaattgctcaagttgatgtcacttgtttaatggaagagaaaggcactagggtgagataagccacataaaatccttcaagatgtgcatatgcatggacattccttccttaaagtttggaaagcaacacagccataaaaaaagataaaaccatgtgcgttgcagcaacatgccagctggaggcctttatcataagccagttaatgcaggaacagaaaaccaaatactgcatgttcttacttataagtgggaactaaacattggatattcatggacataaagatggcaacagtaggcactggggactacaagaggaggagggagtggggacaacrgttgaaaaactatctgttaggtaactgtgctcattacatgggcaacaggatcattcgcaccccagacctcagtatcacgcagtatgcccatgtaacaaacctgcacatgtaccctctgaatctaaaataaaagttgaaattattaaaaaaaaaattagccagatctcagatgtaccctataatttttctctttagggccattataggaaagagccactttatccagcaggaagttaacattcattcagtagatactttttaatgcctgctatgtgtctagacacatagctatrtgccagaattacaaaagtgtacaaaaataaacatggtttttgcccagataaactttactcttaggtgggagagatggctattacagtaacaaacacagataaaaataaaattacaactttaataagcattatgtaggaaaggttcatgatgctgtaaacacatgtagtagtgtcatttgacctagtcttggggctcaaagatggcttccttgaagaagtgactatggagctgacttgaacaatgaatagcagttaagtggatgaagtgagaaccaggcagaggaaagagcattcataagagtcctgtcacgggagaaagtgtgggtgtttttgaggaactaagaccattgcggttgtatggccaagaagtgcctggagaagtagtgactagactagaaaaaagcctgtgggccaaattaaagattttgatttttatgctaaaaatcctgggaggggccgggcacagtggctcactttgggaggctgaggcaggcagattgcttgagcccaggagttcaagaccagcctgagcaccatagtgagaccccatctctacaaaaaaatgagacaaaaaaaaaaaaaacctagccgggcgtggtggcacatgcctgtagtcccagctactttggagaccaaggtgggaagtcacttgagccttgcagtgagcttgttcatgccaccaaactccagcctgggcaacagagcaagacgttgtctctaaataagtaaaaattcacaaaatgtataataatcatgcaaaggcacaacaataaatgatggggcacaaaagtgcttagtccatattggtaattgtttttgaactgcacagtggtaggagttgctccttacaatttttactttgtgaactcttattccttgatttaacccacagccgctacaacaacagccactgtcacttactgctttaccaaaaattggggaagctttcatacttgctttgttaatctttaactgtatgtgtaaagctacacatttcatttcaacatttaatattaaaagtgttttgagtctttacttaagagacaatttggtgtctcttaaatagaggtttagtgatgtctttgtgacagaaatatgacacaggaactgaactcttgtttctatcaattagcctgtggtaaaattggttttgttatatgtcgtttcatttaaagtcacagtttccaagaaactgtcagtgaagtgaggacatactgtatttgagaagtattttggacttagatatagtttggttctgaagactgaagggaaaaatacaaaggaaatataggtttcaaagctgagatttctgattcggcaactgcttggatggtagtacctttcactgagataggaaatgctgcaagagcagcaggtggacatcacggagagatgcttaaatatgggtaaattaacarccaatctgagaaacgcaagtaaatatttctattttttttttcagaatggaaatatatctttattgttttgctgtttataaaagtagtatgttctctttgtaattatttaaacaacacagaagtgctccctgtctcagtgtcatcccccaagaccccaccccaagaaggaatatttccatcaccttgggtaactttaatctagtaccgtttaaggccagggactttgtccctcagtatcatgggaatattctaattttttctctactggatcaaattgaaaacagtacattgkatcactttattgacagtttattaggttcctttttgaacaactgtcttgtgctttaccttcatttccctcttacctatttgtgtagacattggatcttcctttaaccagtttactccccagaagagatttctagaccatgtcaccattttgaccattttgaagtatacaattcatgcattaattacatttgcagtgttctgcaacawtttcactgtctaattccaaaatttttcttcatcccaaacagaaactctgcccattaagcagtaactcattaccccttcycacagccctggtttacctctaatatactttccatctctgtgaacatgcctattgtagatatttcatgtaaatggaatcatacaatatttgtccctttggcttttttcacttagcgtagtgttttcagagttcatccatgtatagaatgtatcattcctttatatggctgaatagtattccattgtgtgtgacaccgcatttggtttattcattcatctgtggataggcacttgagttgtttccactttttggctactgtgagtaacgctgtgagcactggcgtttaagtgtgtttagtccctagtttcatatcttttgggtttataccgagaatggaattgcttggtcatttggtaattttatgtttaactttttgaggacatgccaaactctttgctttcttaattatgataatgcttaagtgaatatctgtattcatgaagcttctttgacacttcctctttttttttttttttttgagatggagtctcggtctgttgcccaggctggagtgcagtggtgcgatctcggctcactgcaagctctgcctcccgggttcacgccattctcctgcctcagcctcctgagtagctgggactacaggcgccccccaccatgcctggctaattttttgtatttttagtagagacggggtttcactgtgttagttaggatgctctcgatctcctgacctcgtgatccgccctccttggcctcccaaagtgctggggttacaggcgtcagccaccgcgcccagcctcctcttatttctttaaattccttgaagtgaaattaatgggtcaaaaggtgcaacaatttgagataccatgctaaatcctatctgaaaggcttgaaccccttttgctgctgccacaaatgtctgagaatgcccttgtcaccaaaccaacatggcacttaatatttcactgttttaaatgttggagaatattgttgtccatttctggtggaaccatagtctggcgacagaatggcttgcctgacacagcttttgatcaccagccccaagtccttctccctccccttccccttatcctttggtgctgatccagcccagtttataggttctgttacatctaacttcccaactgtctctagtctggtcacttctccccatctgcccagcaaagatgaggtcgatttgacttgtaaaagattaccttttctaaacagtttaaaaaaaaaaagatgtcctctaactctgggcctcccgctgccactgtgcctcttctctagaaggcctgaggtctctgtggagcttcctactttggctgcttctcacatcttttcctatctttccttcctgctattctccttcagttctacagcgagtcgggcatgcctaccaaacatctttcagacagtgtgtgtgctgtgtgtgggcagcagatctttgtggacgtcagtgaagaggggatcattgagaacacgtataggctgtcctgcaatcatgtgtatcctgcctcgagctcctgggccacatctctcctgcaatctgcacactgtagtgagagagagaaagagggtggtcatgaccctaggcatgctgtccagacccttgagtgtaggagagccacaagagggccaccttccctaccctttcccacagatcagagccactcttaggtaaacagtggttacaacctggctgggtctgagaggaacctgaggctgcagctagtgaggctgtgctagcagacctgagatctgaccagtcacaggggaagaggaccctctaatgggatccctcagtttagcatcatcctctgttctgaataacacttgtaatatttatcatgtatttacccagctcccattctctgcctatgttgggaaagccatgtattgtctccattttgccccataacagtcttgtgagatagggatcattatccttacttcacatgtgaggaaacaggttcagacacagggacttgcccaacattacagagctgataaagagcgaaggcaggatttgaacctttcaaagactgtctggggctggagtgccgccctggctctcaccatttcccttgaccagcggtgctcagcttccacgagttctgcatccgtggctggtgcatcgtgggaaagaagcaaacgtgtccctactgcaaagagaaggtagacctcaagaggatgttcagcaatccgtatcctttattggggtcgttgttgggagtgggctgtgggaagaaagtactggccagtgtgacctgcatttgggtcctcctggggccctcacttctgcccccaaccagaacatgtcaaaccatggtgggaagctgagctgctagtcctgcccccatgatacaaccccagtttccctattctaggattattgcctattctcagcctccttgcagccattgtcacggatagatagacttgtgtcagcctcaggctgtgttatcttacactggcagttccttcttagagaaggtgttacaggaggccctccctgcatgttagtcatggggaactaggatttatctctatacctctctcagggctgccctgcctccagtaccagtcccctctatctgcctcccaccttctctgcattcagctctttaccccaacagacaggctgtgaggaggaagaggagggggagggcaaagttgggagggctgcctgagtaggaagtgaggctgggcccttccagaaagcagcctccattcctctaggctgtggagcagctggaaagtggggcagacccagggagccccaccacccatgctagatcactcctggcagctcttgcacagagtctcttttctttaacacactgacagctgggagaggcctcacgtcatgtatgggcaactgctggactggcttcgatacttggtagcctggcagcctgtcatcattggtgtagtccaaggcatcaactacatcctgggcctggaatagtgatgaagagcatcagtggaaaacccaccccacacgccatggacctcagggcactctcctccctgcccacaaagacctcctgggtgggaaagactcaaaggggygcttgggccactcaggacccctcyggctgtgtcggactggggagggatatgatggagagccagccagtggggctgtcagcagtggggggctttttaaaagaaaactattttgatgaatatatttaaaaaacctttttttattgtggagcataggaattgcccccctccaggcttcaccctccctgcctaagcagggtgggggcagagccatgacatttttggtttaaaggagccttctcatctctggccgagaacactgctgggctcccaggtagctgaaggcctcagcccacccactcccttcttccctgtgtggggctcaagcctggtgcacttagtatagaagagctaacgtactcaggcttgtgccacgggtgagcactgaggccccaggtgtcctccctcccccactgtctgggacacaggacaggtgttgcgtctgactctgtctccccctgtccaagagctataggctggttgaggcaagtggaaccttatcagtgacttggccaacaagggaagccttggggcctcagaattcattgaaratttgttttgggacaactggaagaatcagcaccatggatactcgcccgtgggcagggctgtggtcagccaagaatagaggtcatatagttgggccatggggcaattgttggcagccatgactgacggccccttgtgcaagctcattcttcagtggatccttcagtggagtggtgacacgtgccagcggtcactctgccacatcacttccttcttgaaagcctaagagtgcgtatgcgtgtgtgtgtgtgtgtgtgtgtgtacgtgaggcagaagaatatgacagatgtcagcttctccctgtgtcagatgatatgtccttgaagctggcaggggattcccagtccagggaatatccctacatgatttttgtcattcatgggtcctccctgggcctgacaacgggagtggtgggtgggtgagaacaggttctgagagggggcttctaggaaggccccagccctagtcctaggcgacttgaataaagtgggaggtcaaacatgggccttcggcattkggtttctagggaatatggctcagtagggcctgccccttcaagggcagcaagaacgaagcaggatgttgtcactcccgtctgaataaagctccatgagctgggttggaaagctgaacatttatcttgctttcttcttcccacctctttccctggggtccccaggggtgtcttgcctttgttaacccccatcggagacctgagggtctgggggtggttgggcctgcctttctgctgttcccagctgttccccwgctgacatccctaggagtggtggaatgccaggctcctgtcctgtggcctgggggcctggggcatcattgggcctgccttcagactgaggttgctctatgttctcactgcctgaggacagtgtccygccaccacctgccttcctgaggaccacactcaggctcggcttctcttccccagctrtggcttcccatggtaccctgctgcttatgccacctgtggggctgttcccctcctcagagaggggaatggggctggtcagaggacctagggatcacccttccttttactttttccccccacccccctgtcaggctcaggtgagaagccgaggccaggctgtccaaagctcttttcatrtgtaacagttctgagtcccttgacctccccccttggcctgactctggtctcggttccactaagacagagtcctgtcatctttccctaccatcccccactggactgtctctctcagaaaccccaggcagccttgcytcctgacctaactcctggagatgctggtgttcttgggaggaatttctcctgcatcttacatgctagaagcccctggggcaggaggtagggggaggaattgagaggaggaaaaacatgaactagacacctagagaagaaggatgtgacttgtagtatcctatgtctaaattaggaatatgaatctggtttttctacaagaagtttgagatcacagctgactgtgttcctgatgcatccaccaaacccagttccatctgtgggcctccctggctctgtcaccagccgttgcaccctcccaatcacaggagtcacaaacctcagacatgcagctcctgtccacacttaatatatgcatgcattggatcacccagccctggtctttctgcctccatggataactgcatgaccctgagagaaaacctccttagatttagcatcctaggttcctcacmcgcctcaccctgaatcctggccctcccgcagccccagcgccatttgtcccatcagtgacaagattcatattctgatgtagactctgttgccagagccagtgttgagccagtccgcctcttccccgggaagtgcctgcccttccctcctgttagrgttggctctcgagcttgtgtgccagttcctgggttggccgtgagagttctacagacaaggaggaagtgctctcggtgtatttcctgtggtgggttcacacgcagctagacacagctaacttgagtcttggagctcctagagggaagcttctggaaaggaaggctcttcaggacctcttaggagccaggtaggagtctgggactactagtgaacctagacctgtggctctggccagaggggctaggatgagagacagagggtgtgatggtgggtgctgggagatgtagccgaccttggggctggtggctrggkgagtgggtagcctgggaaaggccaggatgtggacggactggtatggcaytgagcctgaagtggtccaacttggggttccccagtgcctaggaaagttgtccccttgaatgtcagtgtgaaggtgaaggaggaagcagatgcctgttcatatggaaacaaagacctggctgtgaagaggggaggcggacaccaaagtcctgacacttgggcgggacagaattgatctgtgagagactcatctagttcataccctaggtgaccctgggggtggcatgggggtagattagmgatcccagtctggtatcctctggagagtaggagtcccaggagctgaaggtttctggccactgaactttggctaaagcagaggtgtcacagctgctcaagattccctggttaaaaagtgaaagtgaaatagagggtcggggcagtgctttcccagaaggattgctcggcatcctgcccttcccagaagcagctctggtgctgaagagagcactgcctccctgtgtgactgggtgagtccatattctctctttgggtctcaattttgccttccctaatgaaggggtaagattggactaggtaagcatcttacaaccatttgtggtcatgagagctggggtggggaaggattgtcacttgacccccccagctctgtttctaagtgctgaaagagctccaggctatgctacgggaggagaagccagctactgaggaaaagccagctactgagaaaaagcgggagtggtttaccattctcctcccccacctttcaccagagaagaggacgttgtcacagataaagagccaggctcaccagctcctgacgcatgcatcatgaccatgagacacaactggacaccaggtaggccttggggctacgcatgggcaggcrgggtagggtgaggtctatgaacagaatggagcaatgggctaacccggagccttcactccaaggcaarccacccagcgcacctggtgctgttgctttaagaacctgggcagatattgtagctctggctccagtctaaagcttctctgtactctgttcaataaagggctaaggggtgggtgctgaggggtccctcttcccgctctgattccctgrctagaacccagacatctctgggctggagttacatccttacccgggcagcccactntgtctccagagccgctgacctgtaactgtcctttcctcagacctcagccctttgtgggtcctgctcctgtgtgcccacgtcgtcactctcctggtcagagccacacctgtctcgcagaccaccacagctgccactgcctcagttagaagcacaaaggacccctgcccctcccagcccccagtgttcccagcagctaagcagtgtccagcattggaagtgacctggccagaggtggaagtgccactgagtaagaagcacagtggtggagggtgggctatgggcacagaggttcccagggtcgggttgactcctgagcgccagtccccttctgcccatgtaccaccagctgagccagctgggctgagcacgcaccattctccctccccaacccagtgtcatgggtgcaggcttggcgcagctcccaagatgctccctatcaaataggacagagaactcaagacataagtaatggtcacaggacctcccagagccttggttgcagtggacyccaaggccagcccctccacccagagcctgctggcctctggccatctcagaggagcagcagccatccagcactgcctytgtcacctgggctcccaagtcaccgaggctgggcactagaaaaggtcatcctgaggagacaggttcagaagaggattcatcacgtgaaccaaggaccattcctcacattccccgtgtttagggctagggcctctcggagacaactgsacttctgtaacggacgttcccacctaggtggtgtrcagagcagttctctaggttccagatgcatggggactggggggagctggcagrgagggcacagcagagcagggtaggggaagggcctgctcttctgaagagctaactgctgcctgtgtccctagatggaacgctgagcttatcctgtgtggcctgcagccrcttccccaacttcagcatcctctactggctgggcaatggttccttcattgagcacctcccaggccgactgtgggaggggagcaccaggtgagggtcgcagcagccaggtgggtgggaaggargccttctgcggccttctcatgacctttccttcccttccgctccagccrggaacgtgggagcacaggtacgcagctgtgcaaggccttggtgctggagcagctgacccctgccctgcacagcaccaacttctcctgtgtgctcgtggaccctgaacaggttgtccagcgtcacgtcgtcctggcccagctctgggtgaggagcccaaggagaggcctccaggaacaggaggagctctgcttccatatgtggggaggaaagggtgggctctgccagwgcagcctgtgaactaatgcccagcattcctcaaggtcagccagacaaaaaggaacttaggtcttgggcagaggaggtgtagcctggggcaaagtgatgagatgtccctcctttccttggcctgatccttgtctgccttcacttccctaggctgggctgagggcaaccttgccccccacccaagaagccctgccctccagccacagcagtccacagcagcagggttaagactcagcacagggccagcagcagcacaaccttgaccagagcttgggtcctacctgtctacctggagtgaacagtccctgactgcctgtaggctgcgtggatgmgcaacacaccccctccttctctgctttgggtcccttctctcaccaaattcaaactccattcccacctacctagaaaatcacagcctccttataatgcctcctyctcctgccattctctctccacctatccattagccttcctaacrtcctactcctcacactgctctactgctcagaaaccaccaagactgttgatgccttagccttgcactccagggccctacctgcatttcccacatgactttctggaagcctcccaactattcttgcttttcccagacagctcccactcccatgtctctgctcatttagtcccgtcttcctcaccgccccagcaggggaacgctcaagcctggtygaaatgctgcctcttcagtgaagtcatcctctttcagctctggccgcattctgcagacttcctatcttcgtgctgtatgttttttttttcccccttcactctaatggactgttccagggaagggatgggggcagcagctgcttcggatccacactgtatctgtgtcatccccacatgggtcctcataaaggattattcaatggaggcatcctgacatctgttcatttaggcttcagttccactcccaggaactttgcctgtcccacgagggagtatgggagagagggactgccacacagaagctgaagacaacacctgcttcaggggaacacaggcgcntgaaaaagaaaagagagaacagcycataatgctccccgggagcagaggccactaatggagagtgggaagagcctggaaagatgtggcctcaggaaaagggatgagagaaaggaggtggtatggaagactcagcaggaacaaggtaggcttcaaagagcctatattcctctttttcccacaccgatcaagkcaactcagtactcacgggagaaaaatagactttatttacaagtaataacatttaraaaagatccatccccggcccttaaaaaccttcccatcactccaaatcccaccccagtgcaagtytggggaaggtagggtrtgagctgctgctgaaggctgtcccccaaccccactcctgagacayagggcccatccgtcctgggaaagagcatcctctggcaggtgctcccaccaggtcagacccagtcctggacttcaagagtgagggcccctgctgggcccagccaccaggacagcaggaaccagggcctactcctyttatggtcccttctagatccagaggctaagaggaagactggccaggcccaaggacccagccatcaaaaccagcctcaaatctggttgtgatggagaagtgactttgctttaagaaaaaaggaggcaaggtagggagagcgcccacactgtccatgctccaggccccctgggccagctccgagaaggcgccagtgaaggaccagggaccaggccagggtgcgggcaggcatcrctgtctctaggggtttggctactgttggcctgggagctgagagaaggcactgagagggacagtaggcggaggaccaggtgasgkcagcatcggggacacaggtggggccactcactggtactggccctttagtgctttgcctgaaagagacacagtcacatggccagatgagaacttgcgatactagcctgcacccactggctgggaagatctcttcctgctcccacgcccctgtctggatccyctccctygtgagccccagggttatcagttgctggctgtgcctgagcagctctgrgtgctctccatgagaatggggccatctgtcttctctccttggagaggagctaccaggacagggacacctcttaccccacaccctccagcagcctggcgtggccccatcttggatgctacttggtggggcggtctggggggtgcccatgctctcatcgggtttccctcccccatcctgccagtgcctctaccttgcccttggctcgaggggtggcaccaatggcggcagcagtggcggcrctggctgtggtggtggcaatgcgcggagaacggcgggttccactgcgagtgttgggggaagccttggacagggccttctttgaggctccccgccgcagaaggctgttccctagcttcttgggtgtgttgaggatgctgaaggycatcgactggcgccggtcagcctgcaaggaagggctgtcagaccgggagacccaatgctgccttcccaggccagcgtgctgtgccacgctstaycagcaaggtcccgccagggcgtcgcttcatcccccttcagccccagcctcacctgtttagtagaagctggagctgctttcttctgggcctcagtagtgctctgtttgcgcccttcatgtcggtctcgkggagtcatggggcrtgggaaacagctggtggccttcttagactatggagaagaggacagttaggcagacagtarcaagaggagtcacatctgaagccaggtgtcttgtcctctcagagctgagtggaccttgtaagtcaacgtgcaacctgctccccttcccaactctgggccagatccttcccttcccaacagttcccatccatgggtcaggcccttggagagagggaaagagagggggaagtgagggaaggagagagaaggctccctttagtccttggtgagctgggcctgacctgagcacagtgctggagtaacacccaggagccaccgcgcctacctcaggagttccagggccctggtggkgctctagggagacccgtttgcgctgctgccgggtggtgatgccagtgccctcggctatctggattggctgcatgctggctcggcrcagggtctcttgggggtctccagttttcatctcctcatctgtgatggtgcccaggctcagggaaggctgcatgggtggaagaggtggtcagtggaccatagctgtatggagatggaggaggacctggggctgtyccagaactctacactcgcccgacacttatggtcgggacccttcctgcctcacgaggtagaaagacacaaggcctcctttcctgttctgctttctacctaagccctgggcaaatggccacaagcagtgcagtcctgaccagattcctctctgagctcctgcctaccccmagggacttcacccctgagtgccctcccagctgtctgttccacctggaaacatgagaaggtcaccctccccctcctcggccagtcagtgatccagggccctagtgctcaggctagatcagcaggtgggattccaaggragggcagggatgggaggccctgcacagtgaccccaggcctcaccctggactccaggggatagcaggtcttcagatgtggggggcacactcgattgcgctgctgcagctctgcaatgcggttccagtcatccagctgctcaggctcatcctggcaagtgcccatgtagaagctgttccttcctgtggaaggcagggaagtgggaacaaatgagcctggagtcggcaggtcacctcctggccctggcatcttgccagcctttgctgccacctaccccataaacttgaagcccrgcacaccagtctgattcagtgccgcaggtgcaggagtacggcacacagactatttctatcctaggggcttgctcaccaccttctccctggagagggcagaagaggtcacacgcagagactgctactacatcttaytcacctgccaaggcttggtggccaacacccagaggaacaaattaaggaccgggaattaattcccaggggctccctggtgcccaaaggacaagagcttccaagaagagtctggccagcctggcctttccagcagcccatcaccgcctgagaagggcatggaggactccccacagctaagtgtcacaattgtgctgggaatcccgggcccttaactctggctaagagtgcccccaacacagccagcccctagatgggcaggtaaggaaggccctgaggctgcaggaaggaggggcaggtggagctggatggtagcaaggaggccagccttggatttttaaaaagctttcctcttttccctgtgccacgatccaccttccagtctaattttggggtatagtaagtccctgtagtcccctcacctggaggggccccactggacaccccggcctgggaacgacgagcagaactgcgagtggtggggcggtagccaggcaagctgagcagggctgagttgccataatcgggagaacccaggcgagctagagactgagtagaggaggtggctcgcaggctagcctgggaagcaggagcagacmgcgtgctgtagaacgatgagttggcgctgtctggctcttccayatctagcttctggaagacagagtgaatctgttgcagygtacagtccctggcactgtacagaagcttcccattcccttccgaagccctcagatcccacggcacatccatgtattcccaactgctttgcaaaggtccttaaagtgtgtgtctgcaagaaatgggccttgtcgacagaagccctcacaaggtggtgctgatgttgtcaagactcttctacgcatttttttcatggagtctattcataatgctttgaggtagggaatgcagagtgtttatcggcccattttggagatgaagtgcaaagaaataaagtgactagccccaaatcacactgctaggaagtatcagagctggggctaggccccatgtctcctgactagtcaggctcatcccacagcctctgctgtccctcagtccaaacttccagggcccttaccatgttccagaacttccccaacttcttggtagcagggggcaccctaaacacacaggtcccccctgctgtaccaggggcccctctcccctcctcccaaacctccccttcaagatgtggaaacaaaggcaagggcctgyagcctgtcaggcagtccactgggcagcaacaatgcctctcagctgcatggggcatgctgggaggcacaggatgggctgcagcttcgccacgttctctcccttcaccctgcacaggctcagtgctacgcatggagagaatgctagccttagtcaggaggcagggatctaatcctagccctgcctttttcttcagaagtgcccttaaccaagtcactgccctttttaagacctctcagctttcccactgtaacatggactggctgctcatccctccctgctcctgactgagtgcccagtgcaaagatgcccttgagaggaagtgggaattgctgccctgcagcccctgtcccagcagcctgaccttggtcatggtgatgttgatgatctgcgtggtgcgccgacgagcggagcgggtcttacgacccgagtccaggaagacgtctcccagggagtccaggctgctctccaggggggcctgactccgagcagggatgggagtgaagtagagactctccagggattctaccttggggggcrggcgctgggagataggtgaggctggttctccagggacgctggtgccgtctggctgggtacgaggcagcttgctatggaaaggaaacctgctgaggtacagtccttcacgctagaaggcattttgtccagccctttttgaaagtgaccatttcccatccttactacaagcagatgaggtcaagcagcccatctctctgatttttcagaggtaccaaggaaagcacttgacctgggccttcctttcagtccactcccctggcttctcctaatagctcctcatagtggcaatgcccagacccagatgtcccatccccaccagatgcccatggctgcttcacagcaaacacgtcccaatctaagcccacttctctgttcttcctcctgcatctcccatttcagtgaataggaacgccccccactcaggcccccaagccatgaacgtgggcataatccaatgtcgtcctgcttggcgagcccaatcaccaagcttcctgaacagcwmctaaccacaccccactccatgctcatgtcctttccctggtctgcttcatctcctctcacctagactcatcatggcactgacagaggaagatgagtggtgacaagccaagaactcaggccaggctgcccagggtcaaaccccagctctaccactggggaaccttgggcaagtgactgcccctctatgccccagattcatctgttaaaggagacagaataaacctacctcagagggttgttgggggacaaatcaggtataattgtcatgagtgctttatgtctagcacaaaataagtaaatgtaagtgtttaataaaaacatttttccagtcttaacttctatactagctattagaataatctttttaagatgcaaattaaccaygtactcttcagtttcaaattcttccaaggttcctttttttttctcctaaacctttcaattacagccaccaaggtttcctcaatgcctttaggatcaagtcttaatagycggtctccaatgggccttcctggcctcacatctcagcttagtcaggctctttcacagcctctgttcacactgctcttctcgtcaacctggcacacacacctatggatgctttcaagactcagcaggagcgatagcttccacgaagcctttcttgaccacttgctttttattccaactgtgccctaaatagatatctggtataatacccgtttttckttattcttctctaagaataaatttagatcacatcttatttatctcactaggatacagcctgataaacagcaggcactccataaacagacatagggaggaaggctgcctcctgacctggtgatactgagtggggtcccctcctcgcagctcagatccaggctgtcaatactcaagtccagctggggcttagcctggggctcacggctctttaaagcatcagttgccacctggaatttgcccaggtctcgaagctgctggtctgcatgggcaacctgagaaggagagggccagggggagagtgaagaaaagcctaaggcagcagtggcctaggaggagagggcacaggggtccagtggaataggagtgaggtgagtctgccagccaaattcttacctgtgcctccaggctgcgcacctgggcagtaaggtggcggcaggtctgttcagcctccttggtcttcagcccagcctgctgtagctcatggcccagccgttcagcttcagctcgcagctctttgttttccttctgcagctgctccaggctccgcagctgctcctgcagctcttggttctgctgcttcttggcatcataatgtgttttggctttctccatctgtgggcagagagggtgggtgggtggggtagaggttgaagggcaggaggaaggtggcatgggctggggctgggctccttacctgcagcttatagtgctcagctgcctgctccttctggctcaactgggcttgcagttcattcagctgggcctggaggcgctgggcctcctgctggctctcgcctccctgagcctggacagcctgagaagaaaggccactcaggaaagctggtctggccgctctacccaagtccgcttatctgcaccagccactggggctccacaggtgcttcagactcctgcactttcttaggaagcggaagaaaaccacaccaccccaaatactctctgcccgactacagtctactaaacctgaagcccacaygcccttcagtccacatccgtagtggcctttccctgaccagctcctgccctatctttgccttctttgagaccagacacaaagtgtcacaccctctttgcatgcacaatctcccgtaggaggaagggaaccaatcctcagggaacacccaggtgcagagccntaswstaaggcacttggcatgtgagctctcttaggacaggggaacttgtttctcctcaaagccactctgagaagtcacttcaccctcttttcagaggaggaaactgagttcagagatttaagcaaattgaccagagtaacagtgactaaatggcagagtaagatttggtccacctaactccaaaagcccatgggggcttatttatgatgcccacactgcctcctgtccagaccataactccttaagagcagggcctgattctctgtccatctgcaaggccaacaagtgctttgctgtagatagaagcatcccccctttgcctctcctaacataggacaggccccacaaggagtagaataaacatttgtttattgcaatcaagacatgctgtggcaccatggtatgaaggtgagcaggagaaatgaagctctgagctcccaacaactcctaggagccaccagggctttagtgagtcccaatgccactggtgcccaattcctttgcccctgactgaaggctgtgaagcctagaactgcaaaaagcaagtattaaaccaaagaaggtgacacagttgaaagcattaagaatgttattaaactgcactgtaatattcaacactggtgacactctygttctttccctgcccagactatctagacttacattgtccaaaagaactttatgcaatggtggaatgttctgtatctgcgctgtccaatacagcagccactaaccacatgtagctactgaacaggggcacagtgtagctagtgtgattgaagaactggatttactttaataaatttcaataaccacacgtgactagtagctgctgaagtggacagtgacagttgagagatgggaaccaccctggttgtctctcgagagctcccagaagacacatgcaggggcttctaagccacaggcttcctaggagggctacstggaatgcagggtgcccctcttctgccccgacaccccccacggccccagagcttagagaatagcttccctcccttgtccagaggccagacccattcccccagctgccccaccttcagcttctgctgctgcaccttgctggcttggtcagagtcagccagtttcttactcagttcttccacctggggagggaagaggaggacagaagactcaggaggacttcccctggatgttcatcctggatgtccacccatcatggggtttcccagaccaggatccccagtgttcctagaataaactcaggccctttctctggcctccaattacggaacagcctgctgcccaggctgcttggcagggcctgaatgaggcaacctaacacatagatgttgccagggccaactgttcttgcgtctaccctgagcctgcagagacagaggcctgcccaacccccgtcacctccaaaatcaggagaattgactctggggagccgacacctcaccaccaccttgctgccgccacactctgcagccgcaaccttcccaggacctagtctgtaattctagtagacatactcaatgaattcccatgcctccctcccagaaactgccaaagcccaagcccacagatgctcagacctcttcccaacatccacaggccgttagggctggtgctagcagcatggctgctgtggttagcattggggaacagattgctggaagacaagagcaggggcagcacatgtactccaaagcccaccccactyctacaaagaggaagagcacagggagtaggggaaaagagagaacataacagccccatgcacccttggctgctccaagcattctgggagttcaagcatgaccaggcagcacaggggagaggcaagggctccattgctaactgtttgctattcactttgattgtcccccactatcacaggctccttagaggagggcccaatttttcagcagccctggggtggctgggtaggagagtgatggagaaagggtgctctatagcctcgatgtctcagaaacaccagctctatagcctcgatgtctcaggcaacacagagatgattcccatgagaaagaggcagccagaccatgtgacccccactcccccgcccccatctggtatagacccctcctgctccttcaccctcggtcttcctgctacagacatctctatgctgtgctcggggttagagccccagaaagtgatgggcaagtgtcctaagmccacaatcctccmtaacctgtgggggctgcctcgcatatcaccttcaaggcttccataaagctgtactctgggaaaaagggacaccatgttaaacaaggccgacacggtaattctgctgttcctcttagtcgggtatccttaactagacacagtacttgggaagttctcgaatcccaaggattgtgtctgtcattggttcagggtgggaaagatgaagccagtgctaccccttgtccctgatargcaaatgagagaaggtgcagaagggtggagaggccgacctgggatgggtgggatgaggcctgagagagcccagcacaccacactcctgggcagcctgggcctggattccatggcttgaccctgcccccttcacaaacagttcacaacaggagctggcggaggcaagctgcagccgggctcatgcaccaagactggtcaccgtttaagcagccagcatttagcgaggacctcaggcattacctgcttagtttgctctctctgaaatacctctagctgctccacctgtacatgggggaggagcaacagagacagagtgagatgaggccaaagaagcaccagccctgctgccaggctgacctcactgaggctctgatactttcccctaaggagctagattgacagtaagtttaaaaatgccagttaggctgattctaatccccagtggctcctgaggcatccagtgcaggtgtgcctctgaacaggctggtggtcatcacaacttgactctctagtgacagagccttcaggggaggggaggccactgacattttctttaggatgacaggggcaacagacttgaactccaccagccacctctccttttctgccacccagtgaatgaggaaaggcaagacactccagtgtaggagctagaggccctggacacagaggatcgatgtccccgcgctctcagctcctgatctttgggagggtggttgggctgagtaccttacctgggcagtgagtttctgcctctcttcctggaaccgctgcctctcctccaggaccttgaccttggcaccctcatacttggcagtcatcacctccagctcccgggcagtgctctgtgcttctcgctgcacctcagccagacgggtctcagcatcagcacgtacggctgccaactcttggacatacttytcccgggcctggtccaactccacttccagaaactgccggccaaggttggcccgctcacccagcccccggttctcctctgccagcaggccatgcgccttcttcagcatgctcagctgctctgcatagctggccttctctgcccgcagctgctgagctgttcgctcctgctctgccaccttctgccgcagaggaatcagctccccaagctcccgctgggcccgcagcagctctgcccgcagtcccccagcggcctgcttgctctgctccagctcctcacggtggcgtttctcggcagcggcctgctcggcctgcagctgctggcagaggtgcttagctggcagcagctcactcaccagggcctgtgtgctggtgtgctcgagctgcagggtggagagggcctgctctttctggaagaacttctcctgccacgccttcaattcttggcccagctcctccgcacgctcagcctgtgaggtcagctcctgccgcaggttctctgaagccacccgctgtttctcagcctcctcccggaggctctgcacctcctcccgcagagcagagctgcgttctgcagctctggcactgttgctggctgtctctgcctgcagcaggcgcagcctctcctccagcttctggctcttctctgactcggccatcaccagccgcttcaactccttgctctccccctccttctccaggacctggcgattcaggatggacacctcctcctccaagctgctgatgaggctatttttcctctcagcctcttgccggccccgggccacctgggccttccactcatcttcagccttgctgtggtcttgtaccttggtgcggaaggcagccaactcccgttgggccgaggctaaggcactctgactgtgccctagctcctgggccttctcctctaactggccctgcagagtctccagagcactgtcccgctcagcccgggaggcccgctcagcctcgaggctgcgttccaggctgtcagcctgctcctgctgcttctggcattgctgttccagcttgctcacctctgcccgcagtgcytccagcttggggcctgttggctctgtcctgccagcagcctcagattgggctcctgagccagatgcgtgctccttttctttcttagccagctgttccttcagttgcttcacggtttgccgaagttcctccagctcttttatctgggctgcctccagaccacgaagcttggccaactcctggtccttgccttccttttccgtcagggcatgagccagtgcctcttgcagggtagcgaactccacacgctgctcgttgagggcgttctgcagccgcatctcaagctctgctctggccgccttctccagggcaaggtcagcctgggcacggccccgctcctgggtcagccgcgccacctccctttcctgctgcccacgctcctcctgctgctgcccctggctctccatcagcgcggcccgcagccgttccagctcattgcycatctgctctgcctcccgctccatagcctgcagcgctgcctgtgtgctgcagaactggcgtccctgttgctcttccagccactcgggctgtctgtctcctgccctcgcaggctccttgactaactcccgggaggctgtttcctgctgctcacctgccttgcgcaccaaggtctccaagcgggccacctctttgctggtggcagccatcttttcctgcagagtggagaggtcatctgcaagcttctgggccctgacttccttctcttggacctgctggagtgctctggccaggttggcatggagctcagctagttygttctgctgccggcttatctggagctcgctgtgggattctatgcctgccaccttctcctttgcctcctgcagctcctggcgggccttctcacattcctccttcaaagtcatcagctgttcctggaacatggcgccatactgtgcctcctcttgctggctatcctcataccgctcacgccaggcagctacttctttgacgagctgctcacactcactctcagctgtgtgctgggcasccatggcctctgccagctcccgccgcaggacttcagtctcagcytgatgggcctccccaagctgcwgtaatcgagcctccagccccttgcgcccagccctctcttcttccagctcctttcgttcccgcttatgctgctccaccaggcttcgggtctctgccttcagctcagagatacaacgctgctgctcttccagggcatctgcagccctgcgcttctcctcttcaaggctgcccttggtgaccttcaaggactctttgagggcctggagctgctcctggagctggtccttctcctgggccaccctttctttctcagttgctttttgctgctcagaccgcagctgcaactctagctctgcaacctgggcctgggcctcatgctgttcctggcgggctgtctcaacacaggcctggagttcctccaccttccggctcagctctgccttctcccgctgggcctgtgtcactgaggtctgggcactgtcccgggcttcattagccacctgaagttgctgctgcagaatctccagcttggcagccttctccttctccagtgcctccagctgcttgagagccgcatcccgctcccttaaggaggcctctcgctcctctgcagcagtggccagttgctgggcatggtcctgcctagttgcctcctgcttctccgctacctccttcaactgctgctccttctgcttcaggctactgcttagctgctccacctggtggcggaggccctgggaggcctgttcttgctgttggagggtctgtgctagctgggcctgcttctctttggcctgctgcttcaggccagccagttcttgatcctgttgctggatggtggcattgagtgtggtgagctcagaggtcagagaggccacctgggcagtcaaccgggccccatgagcctgggaggcctgctccagctcttccttggcctggctgaggttggagatggagctctgcaggtcagtgatcaggctagacagctgctgcttttcttcttcgaagtggccccgctcagcaagcagcttggcttcctgctggcctcgctcagtctccagcatctctaccctggcttggagctgtgtgttgtttgcagcaagagtggctgcctcttgcttcaaggtttccagctggtggtataaagagacaaactgggatcagcatgactcctcagtcatcaagactcctctggaaatggaggaacaccaggaacccaaatgtactgaatgtgagtccacaccaaccmgcagcacacaggtctttctgtgcattcctacctgcaagacatcacccagcacctcgcccttctcctggggtgggttatcctgcagctgggacaagtgttcttccagctgtgaaagttttccctgaaggatttcgttcttctcttcaaggcatttctgggagtaaatgagacccatgtgaacagagagggggaacaggcaccagattaccacacaagccctcataaacatcagcaaacatggggcccatcatcttgttaccaagatctccttttgccctggcctagaaaaaagcagaaaccatggaactgggagcatgagggacctgattctctagacctagttctaaggcacaataaagtcataatgtaacctgcttactacttccccaaggctgctgagtttacttcaaatttcctyaccgtatacccttcctcagataagtcttgagtcctagattatccaaatcaccaccagctgcccaccatcctctgggcagcaataccactggcagcagctgcagcaacccccagtcccaaacccacttcttcaccactgttcactaagcacctacaataggctatgctgggttcatccctaawttttttttttttttttttttttttgagacagagtctcgctctatcgcctaggctggagtgcagtggcgagatcttggcttactgcaacctccacctcccagattcgagagcttcttctgtctcagcctcccgagtagctgggactacaggcatgcatcaccacacccagcttatgtgggaggcagctactaccattcctcttacagagcaagaacctgaagcagatgctaagtgccttgatcaagggctacatggttattagtaagtggccaaattgggttcttaccaatagtaacaatcacaactggttcactgagagcttactttacactacacgatgtgtgaagtgctttacatacgttttctcataataggtgatgaggcagctactcgttactactcccattttagggaaaggatgcttagaaaaacagactgattaacttgtccaagatccacatcttgtgaacagcagagataggattgaaaggtgtactataaagtgagggcattgactggggaaaaaaaaaataagttaaaaaaaaaaggtgtactagactgaagcccacaatctttcaattacagcacactattgaaccttgaagagaaagcaacttaatacccaaaggcccagaagagcacagtggtaaactggactcagctttgcacatgtggtcaagactgtggctgtgaccccagcagagggttaccttgtcctgcagggctgcgctgagctccttctccagctgggcctgcttctctagccactcctgagtggccttgctgtgctcctccgtcagctcattgagggcatcctgtagctgctgcagatgactggcaaactcccgcagctgagacgggcaagtgagaatccccatcacccagannnnnngctgaccccaccactgctgtctgctcccagaaccccaggggctggatgcctccaattatcctgccaaccctctacaaaccaatcacagccatcacacctctaattcagaactacaaatcaacatttagggtcacagcccagtacccgggaagccgccaattatgggataaggaaaggggcaaaatatgcaggtctctggagagactgaagcataagacaggtgctgggacattcttctcaaccctctcttggggagccttccagaccacctcagccctgaggggcctccatgcacacaccaccttaacacccaccttaaaggaaaggtctccattctcctccgaaagctggttgattttgcgatccatctggctcttctctgtcttcaggtcctggcactgcttcagggtttcatgcagccgcatggtaaggctgcgagggagggaagcagtgagaagagagtatgggytcctggctgggtgaggggaggggctggggcctgggaaggaatgcagggagagctgtacctctcattcttgtcacgcagctcctcaagctccttgggctccagtgggctggccgcctgcttctcattcagcagggctaggcggtcaatgcgctgctgcatcatggctatctgtgcatctgcccagagtggagggaggaggagaggagaatcagaactatgtgcatgagcggaactatgtgcacagaactatgtgcacaaggggaagggaggagrcggcatagggaagaggaggaatatggtatccaatctaagggaaagagaagatggggacaaagacagaacctagcttccaggaggtcagcctgaccacaggcccagggctgagctctcagctccaggggccagcagaggggacaacatgggaggccaggggacatccttccggcaagtctattcacacatctgccagtgtgccagccacctacccttctcggtgaggagcttgcggttctcagctagctccagctccagctcatccctattacttctctcatcagcaagctgcttcttcagccgtctcatctggaactgtggggtctgcaggatatcacccatgggagaagctggagaacctgagagaaagctgaggagggagaaggcccatatgcattggtaagcgcctaagatstgaagcaatcagcaacaggcagcagtaagggagcggggtctatggaagtgcgcactagcagctgggaggcctgtgcacctgggttgtttgcagtgctacctcaagcctcatgacatgatcttgggaaaacttttcttctcactgccttaatttctttgtcagaaaaaaaaaaagtgatatattctccttggctctgcagagatgtgctaagagaagagacttcattgtagtctcygaggaagaagggtattccataaacagggaacagcttttgagggaggccttctgcacatgacaaatcccaaccacttcccccagttaatactgggtgaggtgaggagatcccagatctaccggatactctaagcactcccagaggctggttaacatcttaactctagaagttaggaatgtgaggaatggatggatgctgaggccctatcccaggaggagaggcccagaacatacttgttcccactggaagaggaggcaaccttctgtagctctaggaagcgaatctccctcttggcctggtggctaggtggggagagctcttcagggaatgtgctagaacaggtagaaggcacaggagctgggggtaagaaatagacaaaataaatcaacaaaggttagtaagaaggtgwaaagatttgcacctttatgcaatttgagaactcgccttagtgggagtatatccatggatacttatatgtaaactaccaaggaaggcactgggcagaacctgaaacctggtgcctgggttatccagagttccgtgtctctaaccaaaatgaagtgcagggcttccatttctacagagcatcattactcagagcacagtggagtgacggtgtcctctggctcagaaactgcaccaagtgctcaagctttttcctcgagtccacactgcagagacggcttggggagccctgagcaggatctccttgcagcccccaacaacctttcctatcagagccattggccaccatttggaattcatcccccctgaagccttgcacctccaaaatgccctcctcctcaaaacccttctctttccgtggtttccgtgaccccttttgtaggactctcctacctctaatcacccattcttaagtctcctcatctgctcctccctcctctacccaccctctaagctcccagagatctgatggggcctcttggctctgcccatagtgcccacggcttcagtggccatccaatgctgacttgcaaacctatcttctggtccagagcctgctcctgaattctggactcacatttctaacatctccacctgaaggtctcatgaggaacctgaatacaaggaacatcaaactcaacggctagaactcgcctagacctccttcttacattcctatcatccaccagctgacctcttcatcagaagaccagcagaacgatcactctttctactgtagtaccagccgaggccattgatatattccgtacttagattccttatcattatttcctggtttatgtatctgcctttccacctagaacatgcactacatgacgggaaaaacattttttaaaagactgtgggccgggcgcagtggctcatgcctgtattcctaacactttgggaggccgaggcaggtggatcacctgatgtcaggagttcgagaccrgcctaatcaacatggtgaaaccccgtctctacaaaaaatacaaaaattagccaggtgtggtggcatgcgcctgtaatcccagctactcgggaggctragcaggagaattgcttgaacacgggaagtggagattgcagtgagctgagatcgcaccactacactccagcctgggcgacagagagagactctgtctcaaaaaaaaataaaaataaaaataaaaagactgtattctcagcttctaagcctagagtaatgattgtttaaaaaataaaaaacaaaagtaggtatgatcacttgtaaatatcctacataactgctgccaggcagcaaggaggagctccataggaactgagatgatacaacatggcccagaaatcgacctactccattacacacacttttcctgagcatcaactctgccttgtgttggggacagaaacaaacccccaccatacttgacaactcaggatcctagtattccccatttcagagatgaggggattctcaggagtgtgtacctacttacctttctgtaggaagttctctaggtcctcattaaggtttagcccgtcctcatggtccagcacaaatttaagaatgacagccaactcagcctgggccacagggagaaaaagagcatcacttaggtgttaggcctctgaagggatggctgccaggagctccaccctggcagtgccagtccccggctccctcatgccctaggagcctgctggatcccattctccctctcagagctgaggtcctatgacccagccaacaacattcaactagagatatgttcaccccacttgtccccttccctcccacctcccctcaagatgtaccgaagtcagagttcctgactgacttaactcctgaccacaagtgaagtgactgttaaggaaagtaacacaatcagaaagttgcttttattgttattgttgttaagaaacaagatcttgctctgtcacccaggctggagtacagtggcacaatcatagctcactataacctccaactcctggagtcaactcctcctcctcagctccccaagtagctagaactasagacacacactgccacacccagctcattttttttaaaaaaaatattttttgttgagacagggtctcgctatgttacccaggctgatcttgaactcctggcctcaagcaatcctcctgtctcggcctcccaaagtgctgggactataggcgtgagccaccacgcccggccaggaagcttttatatataactatgttggcctcttccagatgaccctaccagaggaaaggatgagataaatgaagtgaaagttctgtggggraaaaaaaacacacacacanngaaacacatataggaacagagaataatttctacgtattatcctaaaacacattacagttaaacatatgcacataaaaaaggacttgaaagtacatcctttaaaaagttagcaaactctgggaatgagtttatcggcaactgttatttcctcctgcatgcttttcaacgtttcccagactttctatgatgaatggcaataattgctataactgtatttttaaaaagtccagtatctgctgttcaaagaaaaacaagtcaggtgaggtgaagcatgggctaggcctgctaggtggcatggaggcacaagggcttacctgaattttatattcaaactgttcccagtccctgggacttttggagctcatggtagagtggtataagagcagcatggtcatctagaagccaaacaggaggcagtcamtgagtggggctgtctctcttctcagtgyccccattctgggctgttctggggactctgagctattccggtgactcttctaaaagtcctggaattcagcaatcccaggccaccatccttaacagctccaggaaacactttttttttttttttttaattaaggatagtgtacactgtacaaaaagctgagcgccaagattcctgcatggctcaattcctggactcatggaaccctgggtgtgaagctttaggtaccctctataggccagcacccagaaagagcagagggaatgacttaagactgagctataataaaaatatggtgatagccgaatgagacctgatttctgccaggtctccaccgaggcccacagtaatggtctagtaaaccattgtttgtttcataatctctgtcataagatcatgggctcctagaatccttgggctaaattagcctctgtctcaagacaggtggctgcctggttctacctccaacgtactagagccccagaaataaagcacccatcatctccccttgggttaagagaaggccctgcagggtccctcaggtaccatcaccccaaccctgccctgcctccccagtctggtattccataggtaccttcgccagttccagctctgatccctctagcaccttctgtgcagataccaggcattctggggaagagggatgttttcgattttctgcaatgacaacaacgyagaaaacagggtgaacttcctggaaaccatacctgagatcccagaacactgaaatctggggagcagaatggctatctctggtggggctatgagatgtaggcctccttactcctatggcctctttcccctgccttacaattttccatctgaagtcagttctatcctgggtcaatccaagggctacagggataatggaagaagaaagcagcctcggaattcacagcaactctgggtcatgatgttgcactctcccacccactcaccaactctcagcaccacagaggaagagcccagagatgccaggtcactttagaatcctgttccaactgaggtcacagagtaaacctatagctgagtcagaaaaggacaactagggatacgtgactcttatactgcccgagggtctgggctcaaattactaacaccttactttatctaaataaagcctcacctttcctataattctctaggggtggagatggcagctagctccccatgtcaaagacgaggactctgtggtctaaggctggacaaggggaggggaactgaaaagcactgtactagaagctttgcatgtgttcttatttaatccacccatccacttgaagagcagttatctccatattatagatagggaacctatgtccagaaaggtcacacaagcagtgaggggggtcaagatcaaccttaatgtgcctctgcccctacacctatcgcctaagcaattaattcaaagttatctgggaaaaacagtttttcttgcaagggaaagagactcattctctnttctgtctccttgaagttcggggaaacagaaacttaaggtgctcaaagagttaaaagtgacaggtcccaaaaagtaaccttctggctccacctagatctccgagaagggctctgggactgaagggacactcttcttacaccaactgatgaaggcatcacaagacccaggggatctgaaccagctgttttcatctttgtgttaaagagtggggagccttgaaatttttctcctccagacacccatgaactagttcctctggactctccaatcccacgagctgaggaagcagcttcttcatagctggataagaaaggtgcttactctgcagaaaactgcacacaaagtccagtctctctgacaccggctgcttcaagatttgctgtccctcttcagtgccatggctagaaaaagagcaagtattaggaccagagtattcagcaatctttgcctccttgctgctgcatttcatagtacctccccattccttccagtcttgatctctgctggatctggaagagatccagatcagatcctggaggcaggtgacagataccaggacaccatttatccagatggaactgtgtggtgggtgggaagaggggacttgaggcatggggttcttctggaaaagatggcactctgccaccctatttgcaaacataaaaaagctctgtggaaaggggccgagaggagayggaggcagcacagatgaaygggaagctatattacaccatctggaatggctcaactctaaactgtcaggaagcctggagaacacacctaggttaagagtgagagaagaccatggggagggaaaaacatccaagaactgaaagaacaggaggaaacaaggctctgaagtgacagggtgaagttcccccactaggctgaaggctgagatggcaaaagcctcccagaggaggatcccagggactagagtgttgtttgtttgtttgtttgtttgagacagaatctcgctctgttgcccaggctggagtgcagtggcacgatctcggctcactataacctctgactcctgggttcaagcaatcctcctgcctcagcctcccaagtagctgggattacaggcatggaccaccacgcccggctaatttttgtatttttagtagagatggggtttcgccatgttggccaggctggtctcaaactcctgacctccacccacctcagcctctcaaagtgctgggattacaggctggagccactgcgcccagctaggactagtattcttgattagtggttcttgtctgtacttgcttaactggaagagcgggcagtgtgaagagagccatgaggagagggagacagcagggggagctctcacacagcccaggaggctgaggcaggagaactgcttcaacccaagcgacagagattacagtgagctgagatcatgccactgcactccagcctgggcaacagagcgagattctgtctccaaaaaaaaaaaagaatactagtccctgggatcctgctctgggaggcytttgccatctcagccttcaacctagtgggggaacttcgctggatcccctagctaactgcagttccattttcagaagcagcaggtgaaataccacttcaagttagaaagctgaattctctaggctacagtgggagatcctgattagtgggccccttgcttctcagaatctacactcctagttcttagccaactttctggagggcagggcaggcccagaaccttccaatgccagagacatcctgcaagcataagcatcatccaagccaagactatgagtgtacctccccccataccccatgtgattacacaggcttcttccaagtgaatccctcccagaagcactctgtctggatagttggtctgagatcagagactcctacaaagtcttgaggagatgctaatctcttacagactcccaaatgagccattttccctacccacccacaatctggaatgttgtgactccttggctcagtgtagagcaatatttacctcagagtattccattaaytaaaataaaaagaggttctcaggtgaaatgtttaaaaaatgctgggttaaactgaacattttttatagaagaagatacaacatgcattatttcctaaacctatttgaccacaaaacccttttcccccaccccctacaaagcctggtgtaagtaaagctgcatggagcatactttggacaacagtagtcctagagaaatccagcccatcctttaagactgtgttgaagtctcatctctgtcaggaagccatccacaactcctgccagtcatgcctcggctgtcctccaggtcttcctgcagcactcatgaatgcaactgcaccatttacaactgcccaytccaactgcactagctgaaagccaggaataaagtaggtgctcaatacatatgggctgactgacaactgagggatgctttttactgagaagagcagaaataaaagtcagcaagacaaaaatgtcagamctstaagttttctggcaaaatgcctccactatactctgttattcaagcttcacagctatcaaacagacgggacagccttttttgctttagactattcacgcacagaagaaccaaaagggaaacttgtcagaggggttgatcccagttaattttcccagagagaaggccaagtggccaagcarttaaaccctcaactcccacagcttattttttttttaattttttaaagaattatttttctcagggtgccccttgtccagtgtgcagacaggagccacccaactcccacagcttctatctaccctccaaccttgccatcctctgctgccttctgctgagaactaggctgctgatttaggttggcaccagtagcggtatcagaaatgtaagagccagaacatattaactaagaacctccatttcccaaaaggaagctggtctgcattgtcctggatctgagatggagattagcattaacytgggatttcaatatcgcctacctccaagccccacttctactgcagcctaggttcaggcaacaccctagaagacaacttgcaaatgagcatcttgaatttttggcccttcctatgaaaatttcctascaggttataaacctacagtggctaacccaaggacaacacacatccttactcttgggcacatctactgctcttgtcaccaggccaaggaaatttctctcttcaaaagcaaaagttccttgatctattttgaagtcaaaaaagcatgctgccccatattgtgtgttacaatacaaggcatattatacctggctgcttcacttttagtgaggttaaaattaaacagagagttaggtattgccagactaatggttttaccacccattaatgtcaggtgcctggatctatcacttccttagggtttgcaaaataatgattttcaacagaagttgcaaaatgctgacttacaggtggtacacaaccccaactatgaagtatccttgacaaaaaaaaaaagtgaatcaagcttagatctaattatcagtatataggcaacaaggggaatagtggaacaagttaagccgtaccataataatgcaattaacaaaatccaggatttaaggatttctataagattaaaaaaaaatgaggtggtgtcgagtggggagagaaaaaagcaggaaacaaaactggtgagaggaaatgaccccctgatgaaagatcttaaacaccaggctgaagattttagatttctacctattagaaatgaatattcactgaggtttgatgaagagtcactgaagtgtcacaaagaaaacaagatttgagaaagattcttgagaactcgtgcataggaatgaactgcaataagggcagattagagaagaactaggccatgagggcctagtatccagaatgaggcagagggagggacgctggatgtgagcagagaggatgatgaccaattagagatcagcgccaaggagacagagaagtcaagatgatgttgaaatgtcctgcctgggtaactgggagagaaaatggtactgtctggaccaaaataagaatagtgacttctttcagaggtactaaggcaggtcctggttagagccatatggaatattaaaaaatcctgtaagataacccacgatcaacacacacttcaaataaaaaccactttagcagcagacccatctgtcctgggccacttggccccgctagaccttgctgatagagaacaccaactcatctcttcactcaacaaacattcactaaaacctaaacaatgtagcatcctaagctaggtagggaggaccccaagatgaatcagacacagttctagcctttgataagcttaattctaccttctttccctatcaatgagctgttacctatgaacaggtagctaaagtgcttgcttcagagatatgagtccctgataccagttcctaactgccacrtatggcacataaacaccttcaacacttcagtytatccttggcctggggcaaacaatytaatgtgctttttcttaaaaaaaaaaaaaaaaaaaaaaaaaaaagatgacaactgacctatgcttggtcccagaaaggtaggatactgggaggaagccccactttattcatttccgagataactgtgacgttcaaaggaaatgtgctaaagacacagaccaaaaggccaaactacaatccttgctgcatggtaacaacaagcttattaaatgctcatggacctcagaaatcaagttaattgaagcagtaaaaaccccagaagtgtacttattttataatggcttagaaagaggcatatctgtactgtgctaacaagttagagatgagatttctaggtgtttcttctttccttcagatgtgagagcttcccctttcttccctcagaaggctgcaaagagggcttgtggcatagggtagggatgagtcaagaaaggagggttgtagaagccttctggtgagacaagagatggggaacccaagagtgagcacttggaagaatgtgagggcgtggagccttggaggttctcctgtgcaagaatgcagaagcctcaggatgggacaagcgtaaaacctctcccatggagtggtacagcaactggaagatgaggtcaatgtattcttgcctttaggccccaccctggcttatgatgtcccaatccttcccctgatttctggtcatagccatcatcaagtaaagagaacaagtacagcccccaccccagcaatcagctttgccttagaggctagaaaggggtatggtgcgtactcacattctgtcaatgatcttgatgaagatgctgcagtcctggagctgcagcacagcctccacagggtcagccacgtgtagactgttcacctgtaaatcaaagggaacagcctagtgagaccgttagaagcaacatggtttgctccttttcccagaggcttaatgtgagtgcttacagttgtagactataggaatacaagaactgatgattctcaggtttttaatttcaggaaggagtgccgttgcactcactcatccagttacagccacctgawatgcaaccatcagagagcccttcctttggcttcaactaaataaaagcttaaactttcctaagatgttccagcactgggagtattttggaaggatacaccaataaattggtactaccactgcttctaaagagaggaacttgacagcagggagtctgaggtgggaaaagaaaggctcttacattataactctctgtagctcttgaatgtattatagctctttgtatttcttgaacgtttacattataagtttctgtatcccttggatttttatattatagtcctttgtggctcttgagttttgaaatatctattcaaaacttaaatattacatatatgctatacactcccacaaacatataaaatcttattaatacattttatattatagccctttgtggctcttgagttttgaaatatctattcaaaacttaaatattacatatatgctatacactcccacaaagatataaaatcttattaatacatttttattctttccacacataaagctttggctgaggggagaagggaaaaacaataggggaacaagatgattttttaaaaagggggtggagggagccaagcgcggtggctcacacctgtaatcctagcactttgggaggctgaggcgggaagatcacttgagctcaggagttcaagaccaacctgggcaacatggtgaaaccctgtcctacaaaaaatacaaaaaattagccaggagtggtggcacatacctgtagtcccagctacttagaaggctgaggtgggaggatcaccttagcccagggaggtcgaggctgcagtgagctgggattgcatcactgtactctagcctgagtgacagagcaagaccctgtctccaaaggaaaaaaaaaaagaaaagaaaagaaaaaaaaagggggcggtgggggatgaaagaataggagctgggaatttcaaagaaaaacttcttaattctaatttagttgcctgttcccattctttggcttcagataggcatacatttaaatcagtttttaccactagaatattcaccaggggtcacacacatcaggtacacaggttattcaataagtatacatggtcaacctctacaggaaaacctcatgaattccacaggcactacagttcagaagtagcctgggctgaagtttacgtttttattactataggaagaaagggtttgctaagttaattattcacatattcaacactaagaggggagagagactgagcctgctttaagaaacaaggtattttaaagaacttcagcatagtggttatgtgcagacaactagattctattgcttacaaatgtgttctctatatttgggctgggagccagtacatacacactttgggcccagctcctccacaaacttgccagcaacctttgttacaaactttatttctctctgcactagtttcctcccttgccaaatggatggaatccctactttatctacttcaaaggaccagtgtgagctcaaatgggattatggatgcaagaacacattaaaaaatataaagtaggccaggtgcagtggctcacacctgtaatcccagcactttgggaggctgaggtagggggactgcttgaggctgggagtttaggaccaccctgggcaacataacaataccttgtctctactaaataaataaataagcaagcaagcaagctggacatggtgacatgtgcctgtaagtcctacctacataagaggctgaggtaggtggatcatttgagcccaggagctggagaagttacmatgagctatgatagtgtccctgcactgtggcctgggcaacagagacatctcaaaaaaaaaaagaaaaaagaaaaactaataaacataaagcactattatggttaataaaattaaaataatgaagtagacataacatttgtatttcttaatagttaagttagctgcatgcactatagaattaagaggatttttaaaaatcaatgatttctctacagacatgatagtatttatttgagttaaayactttcacatttaaaaacaacttttaggccaggcgcagtggcccatgcctgtaatcmcagcacttggggaggctgaggtggaaggactgcttgaggccaggagttcaagaccagcctgggcaacataaggagaccctggctctacaaaataataatttaaaaaaatttttagctgggtgaggtggcttgcgcctgtatgctcrcgtagtccctgctactcgggaggctgacgtgggaagatcgcttgagcctgggaggtcaaggctacagcgagctatgatcacaccactgcactctagcctggccaacggattgagaccctgtctcaaaaaaataaataaataaataaatacaacatttaggctaggtgtggtggctcatgcctgtaatcccagtgctttgggaggacgaggagggagaatcgcttgaggccaggagtttgagatcagcctaggcaacatagcaagaccctttccccaaaaaattaaaaaaaaaaaaaaaaagagagagaaaggaaaaatagcccagcatggtggtgcatgcctgtggtcctagctactcaggaggctaaggtgggaggcagaggattgcttgagtgcaggagttccaggctgctgtgagctatgaagctgcaactgcattccagcctgggtcacagagcaagaccctatctcaaaaagmggaatcttttagatgaatcccagttaaaacagattaaaattttttttaacgtgaaataaaatatgacttattgacgtcttaaagagtttgctaatatatttataatatatttttactgtcttttgaaaaaagctcaatctaattggtcaggacaggtcattgtaagttttctaggaagawtctgaaaacttcaggccaagattccattttacctgcagaaaatgaagagactgccaaggctaaaccatctcctatcaatacctgcaatctaggtaaaacattcaaggactatggatgcttgttcactaacaagactaaaaaatcataccaattagctgatgtaaagtctcctaaggaatctggattcatcacatataccaattaagtaataatccagccacagttcctttcatggatataaaaatattttttcttcctgtgagttatttttgctctcaagtgagaaatcatttaaaagttgaggaagtagagaagttccttcatctctagtcagggcataaaacatgagagtgaggaccaggctcaccacataactcaagagttgcctttaaggattgcaaggttgcttaaggttgtcaaatcttaaaataccctgtaacagtttattcattattaactgctgtttacagaatagtttcaagctataatttaagtattaataaaataaaccactaatttatttttatgttataaattactgaaaattcagaagacaaaaaacagagctcccaataattctagtattttaatacaggtacttttagcattttgatgtatttctttcgttttttctaggtaattttttttaaactgtagttggaattatcatgtgtgtgtatgtgtatgttctatgccactcttctcactaacataacagatgcattatttcatgctactacagtttcataaaatttgctttagctccacaacttttgtttaaattgaaaacattctctatactatatttatatatatttttaagagacaggctcttgctatgttataggttggagtgcagcagctatttacagatgcaatcatggctaactgcaacctcaaactcccgggctcaagcaattctcccatctcagcttcccaagtagcagggactacaggtgtgcactactgatcccagcacatataactatactttaacattttcatgcatgttctttgtttktttttttttttttttttttttgacacaggctttcactctattgtccaggccggagtgtagtggcacgatcacagctcactgcagcttcaacctccacagcctcaggtgatcctcccacctcagcctcctaagtagctggaaccacaggagcacaccaccacacccagctaatttttgtattttttgaararacagggtytcaccacgttgcccagggtggttgcaaacttctgagctcaagtgatcctccacctcagcctcccaaagtgctggcattacaggtgtgagccactgcacctggcctcatgcatatttattgtgacttttcagaaaaggatgtaagtagctgctataaataaaactagtcttaggccaggcgcagtggctcatgcctacaatcctaacactttgggaggtcaaggcgggtggatcactggagctcaggaattcaagaccagcctgggaaacatggcaaaacccagtctctaccaaaaatataaaacattgtattttttttgaggtcacattaaaattgaggtcagaagtttgagaccagcctgggcaacttagcaagaccccatctctacaaaaagttttttaaaattagcatggcatgtacccctgtggtcctagctacttggggggctgaggtagaaggatggcttgagccccaaagtttgaggttacaatgaactatgattacatcactgtactccagtctaggcaacagaatgagactctatgtctattttttaaaaaaagaaaaatggttggctctccaattggccctgattaatcagtactcagggtgaatactaaaatatcctgtgtcaactagcatgcccaggaagtattttaaatgtcaagaactatgatttattgagataacatgctaaatgactgcatgtatgtgggtacttgtgcacactatatgtatctcattatccttgtaattaccccatgagatattttattttattttttcatggtgccaagagaaattagaactttatgaggtattttaatttaaaatcatccccattaaaaaaaatgatactggccaggcgtggtggctcacacctgtaatcccagcactttgggaggtcaaggagggcggaccacgaggtcaggagatcgagaccatcctggccaacatggtgaaacccgtctctactaaaaatacaaaaaaattagctgggcatggtggcgtgcacctgtaatcccagctactcgggaggctgaagcaggagaattgcttgaacccaggaggcagaggttgcagtgagccgagatcacgccactgcactccagcctggygacagagcaagactccatctcaaaaaaaaaaagatactgaagatactgagaggccaacttgccctgggtcagagagaccagtgctgtgattctatgctgggcatgtgactctgagacccatatttatcaccacactccatggtctcctctgtttctttagctttatttattatttttatatatatttttgaaacatggtctcactctgtcgcccacgctggaatgcagtggtgcaatcatggctcactgcagcctcaaccttcagggctcaagggatcctcccaccttagcctgccaagtaggtgagactacaggtgcacgacaccatgcccagctgattttttaattttttgtagagacaggtttttgccatgttgcccaggctggtcttgaactcttgggctcaagcratcctcctgcctcagcctcccaaagtgctgggattacaggtgtgagccaccacatccagcctctctagctttaaatatccaatgcactctattattttttcatttgccactgtctctggtagaaaatgtatgaatgatctagcaaaagaattttgatgaagtaatcggcaaggcaacatttgctgatggacaatggcaacagacagaaaggtggtaagagagtgatgagaaccttgtcctagattaaaggcctttgaagaccaaagtccctgcatatgttgatcattaaggtcagcatttaccacycccccttttttttttttaattttttagaccgagtcttgctctgttgcccaggctggagtgcaatggtgtgatctcggctcacagcaacctccgcctcccgggttcaagtgattctccggcctcagcctcccgagtgactgggattacaggtgcccgccaccacagccagctaatttttgtatttttagtagagacgggggggtttcaccagcttggccaggctggtctcgaactcctgacctcaggtgatccacctgcctcggcctcccaaagtgctgggattacaggcataagctccgcacccggcccacatttacccttttattcagaaaaatacacacagagcagatgaaaatgcatttccatgctgtctaaaggaaaactatttagtctagaaatgagaagactttacatagccctggctcctacaaaactcctctcctaactctctcaagcttcctggagaagtatagccaacaaaagagaggaagactacttacccaagagaggagtgcagccccccgggtggcgtggagtgtcatcttggtgatgccagacagtcactccaatgcgcctggaacccaagagaggaagaaaagcagttaatcatatcagatatccatgatcaagaaataaaggcgaaatggttcaatttgccaattctcaacacttaaatcactcttcactgaatccaccaagacaccatgggaatttttagaaagctgagtacacatgacaattactatagagcttacatcagagacgacaggaaagaattgtgcatttaactcaatgtctaccccatgtaatttttcagttccacagaaaatacaacatccaaagctggccttcaaccctactctttgggacatgatgcccttaaatatggaacaaacatggttttcagacagacctgggtctggatgctgatttaatgtgaccagggtcataggaccttagacaagcaacataacctctttyagtctttttctttatctgcaaaatgggatccacatacacctctctgggttattgtgatgcttaaagataaagcaaatagtacggtgcctggcacatggtaggttgtcaataaataattactgttcttaagcagaaatgttgatttctagctctttctacaggtacccaaattgtacctaacaatacctaagtccttggggaaactgttctagtttctggatttttatatcctccacagaaatgtctcacaaacacagttcaaatgggggattgagaatatccaaacttaggtctctggatgaggtcgagcccaattccggaggagatcccatgggacatttaatgaaaattasgcacctgtcctggtgttctcatccccaatttcctttcccattgagattctgccacctgcctgccaacccacccaagagaccacagaccagattaactaaatattcaccaacacctcctagcaacccttgcaattttcactaatctccaggggcacaatgagccctgcccccatctcctgccacacgtgctcagtctgtaattactctagaaggaggaacaagagtggtaagagccacatcacttgtaagtctccccatatattagcatctccagagtgtgggctctgtggaaccagtctcatgtatgcaagttggggataaagaaagacaccattcttgcccagaaggtgctcactgtctagtamgggaaagagatacgaaaatctgaaaattcactccccattatctcttggtccttcctatccaagtatactctatttatcagccaaccgaaaggtattttcttagttcctaaatatgatcatcctcgctgggagcagtggctcacgcctgtaatcccagcactttgagagaccaaggcgggtggatcgcaaggtcaggagatcgagaccatcctggctaacatggtgaaaccccgtctctactaaaaatacaaaaaaattagctgggcatggtggcgggcgcctgtagtcccagctactcgggaggctgaggcaggagaatggcgtgaacccgggaggcggagcttgcagtgagccgagatcgcaccactgcactccagtttgggtgacagagcgagactccgtctcaaaaaaaaataataaaaaaaaagatcatcctgtgctagaagccacatggaaaatgggagacaatgacatggtccttgcctttgaggggcttatagcagggtagggagtaaaattaaacatatgtgaagcactaacagaagaaaataattaaatgctaaatataactaaatgctaattacaattaagtgcttcctgaccctgcaacatccaacatgattccacatgtcataccagcatcagtcttggaattgagccaattcacctgggctttggcaagggcaaatgaaatggttaagagagctctcaggagggcagaaaagctaaggggcttatgttcctcagtcttggataattatcatcaagtataccctatccatgggcaagattatgtagcccttgaggccaggcatggatggatgcagatagccccaactactgcactgcaataaggcttttctgtggctgacaagactaaagctcgagggaccacacttggctctgtggtsgggcggcaacagccagacactcaactggggtttctttaaaaaaaaggcctctgagctattaaatcacaaggaatgaggctgagatcaccgctcccccatcctcactgctgcctatagacttgcagtccttttgatgaggcccaacacttcgaaattttatctgcaactgtaggcagatcttgccccctttgaaagactcacagctgtgctactaaaaatgtcctgaggtttaaccaacctcttcatctcagaggcaaaacatacaaccctgaggtcctcccaggagagcctgtctaaaactagttccactgttcaagaaaatgagtgtcaaggctaaatattcttttctgtgttccccaggcacagaaatacgaggaacccaatattcaccactaggaactcctgaaggaccttgtctgctcttcagttctaagcctgtaaagaggtactttcctagagacagaacatcagggtgagagaggcttcaggagagccccagccattccctcttctctgggtaaggaatgactgaagccaggagcacagctaagtcttctacattgggactatagctttaagcagactttggctgggaacccaagggctcccagccagagtaccatcctccccaccctccccctgaaatctgaggcaggccccacccagtacactgggtgatgctgatggaaaamcagatccttgcgattgtagcctggaaccatttcacagaaggatctgctgagatccaccccagctggatcaggcaccccccgtcccccccacaaccctcactcaataaacaaagaaacaaaaggccaggccctctgagggcacctttggagttcccatctacctgattctctgagaaagaaattcccccagaatctaaaacagaggcctcaccgagctggtaaggcaccctctcttttccctggtctcaagaagtaaccaaggacacagaagcagttgcgttataaacttaaggccctgcatcctttttacatttcccaaactgacacaatgcagctcccccacatcaggacaaattcccacatttacagtaacccctgtttccagaaaataaatatcaagataaggaaagtgacactaaagagacacgcagccactctgcctgtaccctctctggaccttaaagagttaaagcctagccatgatttcctaccagggctgaggctaatgtaaaccacctgctcagacrcaagaagcaggaccagagggtcaagttgctgagctctgaagtctgttctgaaaaagcttcagttttaagtacagaacaagtgataggccaaaggccagagggtctgagctgcagcagcactgctctccttaccccgcccttggcctgggtgccagctcctttgagactgcctcttagccacttactgcccatcaagggaacaccagacctacctcaagataacaccaaagtgacctttggtcccagagagttgttaaactataccgatctctcagctcatgggcccttgcttctgctgaaccctcattctcttagtgctaactcccactcccagaatttcagggcccaaagcccacacaagctcccacctcaaagggtccttcccagaaccccacccccttctccacctgatagttccaaaggcctacagcctcacagctcacaaaggaaatggctgccccatctgtgcgccagtgctcacttgcaaaatttaccaccacttaccctgagacgctgcctgcctgtagcctaagaattccatgctctgtacccctttcttagaaagatactccccatctgagagacactcacatccaaagagtgaaaaccctgatcttggggctcctcctcctccaactctrggacggataggccaggaggcacatgcaagcaaacaccgagatctcacctggcaggttacccagaggggccaagccaccttgccctaggctaataagctataaaaacagcataggaaatactttgctggtacatcccctgcctctgagaagataaaaggcaagaggaccagtggctccaagagacgccatacagagaaaaacaatctttctcaattcctggggagtcctgggtagaccgtctggtccaagtccaaagagtttcctgaggtcggggcaaaccagtttggtccatctaaagggactagcttgggctgaagcctcctcttcacacagaccactccatctttgtagcctagagtttggcacagaaccccaaagccctggagaggaacaagggagggattacagaggaaaccaagcttctctggtttcttcaaaagtggcttacagatgtctgccccttctccccgttctctggagggtccagatcaggatgatggcaaaagagctgcaatcaggaaccagacctgcaaccaggcctgcagccatgtattgtactggggcgcgtacacatacayacacacacacacacacacacacacacacacacacacacacacacacacacacacacacacactgacctgggccccccaccactatattcacacaccctggtccctatcagctgacaaaatgaaccttttttcactgcccaccaccgtgcacacacccacggcctcacgcagaaatggtgaagccctctcctgagctgtctctacagctcaacgtgcaggcaaacacgctttccttctctgaacaaaaacatgctgacatctacgcaagggggaaagaaagcaaccctttgctctgaaaggcnccaactcccggatgttggcaagctctgctccacagcgcctgtttctgagtatgtttacttgctctccctcttctctccctcccctttaaggatggcgcaggaaagggaggtgaggggggagaatccaccccaccccctcgtccatgtttgaacaaaaacccagagaaagagtgagggagaaaaagtctcggtgcgggggggccttaccagactcctaaagccaaacgtatctacaggttttaatccgccattagcatttaaatcttgaaaggagaggaggaagggggggccagtggaaagtaaccccacacacaaaagaaaagttgttggttttcttctcagtctgcctggcaggagcgatcktcctggctgacagccagaagtgcgtcacagccaggagtctgctttctttaaaggcacagcaagcttccccgatctgggagcgacagcaagcaggggactctcagtgggggtggggcccagagggagggggtgcactggagaggaggggctgcaaaggggaaggctggaggcttggtccacgaacaagaaaagcaggacgaatgggggcggcgggttgagggtgaaggcacaagcaggcaggcaaaattactgaactccaacagcagcaagagccaaggcaaactgtggcataaacacacaaaacacatcttacagtggcctgcctgacaaactgggatcaaccggacactcccccttcgctctgttttccacccagagtttaaggcagcagtaataatctgtccatctctctggacagcaatggaagggtaggacaagggctgtcctgataattagatcagcccctgcctggcggaccgcagggcaaggaggaagacccgggaacagaggctttgaagaacaagcaacatgcaggccctctgatcgggggcaccttcctgccggccccagggcaggctgtgtctttaagtacaaccatgccactcacacacaaagcgccctgccaccttccatgggcaccgcctgccctgctctgggacacggccacccactaaatccattccccgagggaatctctccagcccataccttctgcgtggcaaggccaggatgccgtgctgtgcccgctcctccccctccgccacccaaacaagaagcccaggcagattctggccctggagtacaggcctgcgctgtcctgtgctgcgtgctattgtcggctgtggaatggccgccaaaatcccagctgtgctgccagaacctaatcccctgttccgctgagcatttatggggaggggctgaggggccaaggcacgagaccgagtacgccaggcactggctgcagcccttaacagacgcaggcacsgggacttgtagactctgcttctcctacatggctgaaaacaaaagatgtctgactcttagaagacaaaaycacagcatttccccccactgaatagcgaacttcaccaaggctgaaagggaagcccaccagatggtcaacaggcaccccctaatcttatgccacaaacatttactgagcacctactatgtgtaaggcactcctataggaaactgtaggaagtatacaaagatgaattaagcccagcatccgcactgaggtaggttgtaattcacaggagataagaaatatgacttgaagattaatttcaaactggtgtgctaacttccataaaagctgtaaagaaaaattctaaccagtttagaatagggaaggattacgaaaatgaagtgccattttaatttggaccttgaaacacacaggtagcatttccccagatrgaaacagagaggtgtggggaggaagagaaagcagagaggaggcatggaagcagtgggagaaagggcttgaagagtgaggtggggtcagagagctaggagaatcttgaacctcaaaccaaggaatcaaagacttgtaagtttgtttgttattaacacagagctgtggtatgacaaaaactgtgccccaagtttattctgatatatacctgaatgagactagcagcaatgaggtgagtcaggaagctgcacagtcaggagacaggtaatgagggcacacaagagggtaaggtaagaaagaatggaaaggggscttggcacgayggctcacacctgtaatcccagcactttgggtggaccactgaagtccgagagttggagaccagccggggcaacatagggagatcccatctctacaaaaaatttcatgaataaaaaattagccgggtgtggtggcccgcacctacagttccagctacttgggaggctgaggtgggaggatcacttgaacccaggtggaagctgcagtgagagacattgtggagacagggtaaagaactgataggaggcagagagaggaactgtacaggggaggaaagtatgagggatgatatgcagaattaaactgaggagatgacaggatgtcagaacaagagagaaaacagagtataataaatagtagctggtggggcacggtggctcacgcctgtaatcccagcactttgagaggccagcctgggcaacatggcgaaaccctgyttctaccaaaaaatacaaaaaaccacacaaaaaaacaaaaacaaaaaattagccaggcggagttctttttttttttttttttttttttaaagcagggtctcactctgtcacccaggctggagggcagtggcgagatcatagttcactgtaacctcaaacttctgggatcaagtgatccatctgcctcagcctcccaagcagtgggagtacaggtgtgtgccaccatgcctggctaatttttttttttttttttttctgtaragacaggctctcactatgttgcctaggcacagcattattttaaattcttctctaaaaattctatgcttctcccaaagccctgggatacaggcatgaaccaccacacctggcccacagttgtctttgtctttttctactaggagctatactatagaggtcacaatcattggctacagtttataatatataggctaaaatgttttacatataarataaccagtaaaacttcatgatttaraaacaaattagtgtcttttttagtgtcarartcccagctactcaggaggctagggtgggaraattccttgaactcggaatgagcagagatcatgccactgcactccagcctgggtgccagagcaagactctgtctcaataaatacataaataaatggacagatagataaacagagagacagaaagacatatagtagctaatgcttactgagtgcatactatgtacrcgacactattctactgacctaatatgtacgaactcattaatcttaaaaactcccttaatgaagtaggtaccattatcacccaactttagagaggaggatattgagccacaagattaaataatttgccaagatcacatagcaagtaaatggcagaagtctctaccacatgctgctaactatttgacattggcaagaaacttctgaactttagtatccctatttgtaaaacaagaataaagacacctgttataaagcaatgaaaattaattcaataacacctataaggtgtccaacacactggctagcatgtaaggcataggatgggtgtttcctgcagactaattcctacttggcattttggtcccttgtcaccaaggtgtccaagcagaagttggctcaccaattgtttgggaagccagagagggtattctgcctggagcaggagactggatcctctgtctgtctgccttcttcccatcagtctgcctctctagattttactttagggtccagctcaaatatttaatatatttgatttaatattcctaactcctcaaatatttaacagttaacaggggttactttngsgggggggaggagttagattgtagggaacattcacttggggacttyctatgctgtatgtttgcttttttttttttttttttgagatggagtcttgccctgtcacccaggctggagtacaatggcatgatctcagctcaatgcaacctctgtctcctgggttcaaatgattctcctgccacagcctaccaagtagctgagattacaggcacctgccaccatgcccagctgatttttttatttttagtagagacagggtttgaccatgttggccaggcttgtctcgaactcctgacctcgtgatccgcctgcctcaggctcccaagtgctggattacaggtgtgagccactgtgcctggccttgcatttatttttaataatcttgtattacactggtgataagaaaaatgtaactacctcctactcttggcacttatgtgtatatgcatgaaaatcttgtcttcacatctagaatggaaattcctcaagggcataaccagttccacctctctctctctgtgatcccccataacacctagcacactagggctccttaaatctgcttctccaaactacatctggatgtcaggtttacaaattcaactttctggccaccagagaatgactgtggtgggtggttgggatgasgtgggggtgggggtcagaccaaggctcattgctgtaggctccccatcacctgctgcttcttccaggccctgtaagctattcccactgtatcatttgtagtctgtagttagcaatcactattagtagaaatggaagttcttatccaaaggagcaccatgaaagcaaaggcaaagcagataccaaaacttttacagaaaagcaaagtggcaaacataattgtttgggtttttgttgtttttgttttcttgagacagtctcactctgtcacccaggcttgagtgcaagtggcacaatcatggctcactgcagcctcagcctcctgggctcaaacaatcctcccacctcagcctccggagtagttgggaccacaggtgcatgccaccacgcctgactaatttttgtatttttttgtagagacagaatttcaccatgttgcccaggctggtctcgaactcctgggctcaagcgatctgcctgcttcagcctcccaaagtgctaggattacaggcatgagccatcacaggcctggccaaacttaatttaaagactggcattatcaatgctccagaaaatgtataaggtgaaaataggagggaggcctgctaaaactgccctggccacatatggcaatgcatcagccctgaagcttcctagcccagatagaattgatattgtctcaaaagcgtacaagaggtctccccagcctggccccttgctctaaactcaaggcaacagcttccagctgtgcagcttccgagaggctgaaccttcccctagaacccctctgcaaagctgccaagtttctgggccagctcttcaggacagcccaaggagcctggccagtttcgccaggctttccctcctcttcctccctcctgtggcagcagcagaatttccacagcccctctcacagcctagacaggcagcaggcggccacatggctcctgcctgattcttactgtcctcagaagagcgggaaaggagtggtaaaacctttctagaaaaagagaagggccgggcacggtggctcacgcctgtaatcccagcactttgggaggccgaggcaggcggatcacctgaggtcaggagttcgagaccagcctgaccaacatggagaaaccccatctctactaaaaatacaaaattagctgggtgtggtggcgcatgcctgtaatcccagctattcgggaggctgaggcaggagaattgcttgaatcctggaggcggaggttgtggtgagccgagatcrtgccattgcactacaccctgggtaacaagggtgaaactccatctcaaaaaaagaagaaaaagagaagaaagaaaggggtggagagcggggagagggagagagagagagagagaaaggaacaaaggaaggaaaagagagaagaaaggaaggaaagaaattactttaaattcagtagggagggctgggcacagtggctcatgccttaatcccagaactttgggaggtcgaggtgggcagattgtttgagctcaagagttcaagaccaacctatccaacgtgacaaaatcccatgtctactaaaaatacaaaaattagctgagtgtggtggcaggagcctgtaatctcagctacttgggaggctgaggcaagagaatcacttgaatccgggaggcggaggttgcagtgagctgagattgcgccattgcactccagtctgggtgacagagtgggactccattgcaaaaaaagagaaaaaaaaagaattttaaattaaaataaataaataaatttcagtagagttcagatagaggttgaagcggggtggtgactggttaggagcacaaaggttatttcaaagggtcaggtgatcctcctgcctcagcctcctgagtagctgggactacatgcacatgccatcgcatcaggatttacattatcatttttgaaagtttaaacaaaaaaagactggagctgggtgtggtggctcatgcccgtaatcccagaactttgggaggccaaggtgggaggataatttgagctcaggagttcaaattcctcaggagttcaagaccagcctgggtaacatagcgagatccccatctctacaaaaaataaaagaattagccagacatggtggtgtgtgcctgtagtcctagctactcaggaggctgaggtgggaggattgcttgagtccaggagtttgaggttatagtgagctatgatcatgccactgcactctagcctgggcaacagagcaagacacgtctcaaaaaaaaacaaaaacaaaaacaaataagtactaggagagttcaagtccccagtcatccccatgggatgattctcacacaaataattagcctggcactcaaggccctccatgacctgcagcttctagagttctagcttctagagtcgttattcccttacccaaaccctccactctgccaggcaggtctataaagttacagtttgtcctgagaattagacaagatgaccgcaggggacaggctctggattagctacgaattacaacagtaacagcaacgataatgatagtctttactatgccaggatgtaagtgacagagaaaagactagaaggcattgtattgggcagttttgtttattttactttatttttttaataaaattaaaaaatatatggaactcttcacaaatttgcatgtcatcctcgcacaggggccatgctaatctctgtatcgttcctattttattttgttccaattttagtatacatgctgccgaaccaagcactgggcagttttaaaaatgaagaaatctgaggctcaggaattaggtgacytacgtgatctagtcatgtaagtagtaagttgtctaccttgtccctatattattcttttttgtttttttctttcaagatggagtctcgctctgtcgcccaggttggggtgcagtgctgcgatctccgctcacygcaacctctgcctcccgggttcatgtgattcttgtacctcagcctcccgagtagctgggataataggcatgagccactgcacccagccagcctatattattgtctacagctgttaaataggcaatcattgagtgaatgaataaaagctagcacattctcagcaaatcaaagaagccgtgtgcttttcctcatgaaaatcaacnttttttnattttttgagacagagtttgctttgtcgcccaggctggagtacaatggcacgacctcagctcactgcaacctccacctgccaggttcaagcgattctcctgcctcagcctcccgagtagctgggattacaggcgctcgccaacatgccggtctaattttttttatttttagtagagatggcgtttcaccatgttggccaggctgggcttgaactccttacctcaggtgatccacctgcctgggcctcccaaagtgctgggattacaggagtgagccaccgtgccaggccgaaaatcagcttcttaatcaaaataatcaaacagctccaatttcaaaattaatcactaaagaatttttttctgaggatccgagagctttacaaacactraagggccaaaactcctctaaaaacagcaagcaccaagaaaagtcttgtactaggagggatgttggcagtgtctcaagggttagagggggaggctggaaggaaatgctggtgctaaagggaaggactgctgtttcaggagcctgaccttgagcttatttaccatggcctcattgtccctctccagargataatggctgattaatgaggcagtgttggtaagtctgaggcttcctggagagaaaagcagagggcaaatcaaaacccagagaggattcattataacatccaacaggcccactcagttctctctcaagaaggcctttctacaaaacagctaagaacctctccaccctgtttcactgtcacagaggagtaaaatggctctgtccctacaggcaacatatcaacatatctagcacaatgtttgctcacaaacacagaactaattataagaaatgtgaaagaacctgaaacgcagggggaatactcttactggagacagcctccatagtggtagaaaacatagtagatctggtgttgaaagcccctggaggggtgatgggtcacttactagctatgtggcttaatgcaagtcacagaggcaaattactgagaaccaagctagggtcggatcagctctaaagtaccttttcagggccaggcacagttgctcatgcttgtaatcccggcacttttggaggccaagatgggaggatcacttgagccaaggaatttgagaccagcgtgggcaacatagtgagaacctgtctaaaaaaaaaaataataataatatatatatatatatatatatagtgtgtgtgtgtgtatatatatatatatatttgcctattcatctatctatagatagataaataaatagatatatatcaaaaaaagaaaattggctaggcatggcggttatgtgtctgtagtcctggcaacttgggaggctgaggtgggaggatcacttgagcccaggagtttggggttacagtgagctatgatcatgccactgcactctagcctgggcaacagagtgagaccctgtctctaaaaaaataaaataaagtacctttccacttccaaaaattcccatgattctttccacaggataccattctcaacaacaaatcttgtagtagaacttgtctcctcagaatctggtcaaaacatcactagttagggtgttctttcaaaaaaaatagcaaatctcctagaaacaggcacattgtgtgttaccctattaggacccatccccaaagcgaggcacatgtgggtgcttcattaatactctgttgaaaggaggaggtccttggaaactggtagtaccaacttagcatggcatacaatgaaaggtgattggagccacactcgaggaactacaaggcagcttttcataaataaaagccacaaaatgcaatttataactacatctgtctaaacagactaaagaaaagtagctttctatacctaggtcttcaccccttctcctccccacctctctactttatcatccctgtcctacacagcactgagacccgtctttctggttccaggtccacttttcctttttccacaccagaatgcctttaatcactgatagaaatgaacaaacatgaatatgagttctaaacaggaagacagatagcctcaagaaccaacttgtcaatatgttactaataagtgaaataagtgggaatggtgtctaacatgggcatgataaaataaaaccctaaaatacatactgtgctagggatttgaacaaacttcaggatttttaaggaaggctgtgtctcacatctcaattaatcttcccaaaagaaccctaagaggcaaggtttattccaattttataaattaggaacgtaaggctcagtaaaaagaaaatacctgcctcaaggtcgactggtaaggctgcagagccagaactcaaagagatgtcttctaaatccagtgctctctccagcacatctcagctacatcctctatctttctcatcagtataggtcttcatgtatacaaagcatttctgcattcattgttcacactgcttctgccacagctcatgaaaaggacaatgcagatgtctaaatggcaccagatctatacccaccttttttttttttttttttttgagacagggtcttgctctgtcacccaggctggagtgcagtggcayaatcatagctcgctgcaacctcaaacttctgggctcaagtgatcctcccgcctcagccttacaagtagctgctgctacaacaggcacgygccaccacgcctggctatttttaatttttagtagcgatgaagtctcgctatgttgcctaggctggtctcraacacctgggctcaagcgatctgcctgcattgacctcccaaagtgttggaattaaacggtgtgagccaccgtgctgtcctatccacacttttaaagatgctaataaataacgtgatcaccatcagagaaaataaatcctacgtatctggcatcactgagaagtacaaaatttcacacaagcaattttcctactaactgaaatttatcccttttaaggcaaagctctttctttatatcaaaacatattctccaaaatacataagatatgttactctttacttagaattaatgaaatttaatcagggatattcgactataaacatgatataaacatcctacatactgtgctaggaattcaaagatttttttttttttttttgagacaaggtctcactctgctgcccaggctggagtgcagtggtgcaatctcagctcactgcaacctccacctcccaggctcaagtgatcctccctacctcagcctcccaagtagctggggctaccggtgtgcaggaccatgcccagctagttttgtactttttgtagagatggagttttgccatttgcccaagctggtctcaaactcttgagctcaagcgatcagcccaccttggcctcccaaagtgctgggattacaagtgtgagccactgtgcctggcccaagggtaaatctttaaacttgagtttataatcttgtagaggaagagacacatctgtaaccataatatgaagccaaagaacatgggcttggggtgtgctgaaaggaaggtaagataacacaagcaaggctagtggggaccaacaacccagggtgacttactgaagagaagtgggaggcactgaaaagtcctgggcaggagaatggtatactacttgtgctttttgaaaagatgactctagcacaacagtgaggccagaggcagaaaatggacttaggtggcagcgacagaggtagagagaaaactgcactgccagggcaggggcagtaggaactaaaacaggtggctctgaaaggcattacagacgtagagacaatgctcttagcatataggggcgtgggaaaggtggggagctaaagagaacactaagattcttgctttcatggaaagatttcagaaygagaaaataagagtaggtactggtttaaaggagcgtgagggactaactcaggatgggatgatggggaatgctttatagaggaagtgacatttaagctagatattaaaatatgagcaggataagtagagtttcaccaaaaagtaaaaaagcattctaggcagagaaaacagcacatgcaaagacagaccatattacagttgaacaatggcatgcagttttagggaggtgcatcagatgataagaagggtaataagtaaggccaggggcggtggctcacgcctgtaatcccagcactttgggaggccaaggcaggtggatcatgaggtcaggagattgagaccatcctggccaacatggtgaaaccccgtctctactaaaaacacaaaaattagctgggtgtggtcacatgcctgtaatcccagctactcaggaggctgaggcaggagaatcatttgaacccaggaggtggaggttgcagtgagccgagatcatgccactgcactccagtctggtgtgctccagtcagagcaagactccatctcaaaaaaaaaaacaagggtaagtaatattaaattgtgaggcacttgcctcatactaagaaattgtaggtgatgagaagacaatcaaggtttctaaaggaagagggtaaaggggagcagcatgatcagggctatgtttcagaagggaaactgtataaagtacagactggaatggtaagacacaggaggaaggcaatagagcataatggctaagattacaaggtctgaacttaagacaacctaatacaaattctgggtttatagcttaatagctctgcaaccttgggcaagttatttactctctctgtgccctcattttccccagctgtaaaatgggaataataatagtactttatcaggcacaagccaccacacctggctattttatttttaatttttgtagagacaggatcttgctatgttgtccaagctggtctcgaactcctcaactaaagtgaagctcccaccttgtcctcccagagcactgggataacaggtatgagccactgtgcccagcccatagttcctaattacgcctttttgtattttattaatttatctttctcttactgccttaagttccatgaaatcacaaactgtgtgctcaccgctgaattcttagaaatcagcacaatggctggcacagcatgagtgcttgataaatacttcttgaatgaatgaaaggttccaaactatatattttaaatgaactctatttaaatgtaacctttatatagaaccccaggacacacagaagaagacagtttgaagtaagggatatttggagacttgttccctctgcttccccctggktcttaagtcagttctatagttctgtaaagctttacagaatgcagtgcaaaaaccattgtctgttacaagcaagaagtaatgtatgtctgaagtaaggcaatgacaataaagatgcaacaatagctttgagaactatttatgacaggccctgacaaccaattacagtaggccctctgtatccatgggttccacatgtgtggattcaaccaacctgagatgaaaaacattttrgggaaaaaaaagcatctgtactgaagatgtataaacttttttttcttgtcattattctaaacaatacaatgtaacaactatttacatagtatttacattgcattatataagtaatccaaggatgatttaaactatacgaaggacgtgtgaaggttatatgctaatattataccattttatatagagacttgagcatccaaggattttggtatctgtgtgaagtcctggaaccaatccccacagatgctgagggacaactgtataaatgaagaatgagaaaaggaaaattcttgaagcacctctaaatttcctagcttgagtgaacaaataaatgaacatgtgtgccaaaaagcaagataagaatgtaagagtggctgggcacggtggctcacgtttgtaatcccagcactttggcaggtcaaggcaggtggatcgcttgaggccaggagttcgagaccagcctggccaacatggtgaaaccctgtctccactaaaaatacaaaaaaattagccgggcacggtggcaggcacctgtaatcccagctacgagggaggctgaggcaggagaattgctcaaacccaggaggtggaggttgcagttagccaagatcacacaattgcaatccaccctgggaaacaagagcaaaactccatctcaaaaaaaaaaaaaatgtaagagtaacaataacaatttccattcatttgaacatagtatcacccctatcaagcaaatactattaataccctcaagttatagaataaatctttcacgatgttaagcaactgtcatgatcttcattagcaaagatcatgaggctaataagtagcagaattaagtttcaaatccaagactgtcccactccaagcccaaaatctaaaccgtcttgctatattggcaagcagtttgagagttaggtcttagacgtgagatatctactggatatacagttagaaataatcagtaactaatgaaaaatatgatttggggttagagataaggatctgggctccatttggaagactgaataaattcagaagagtgtctatgagaagatcatgcttgcttgtaaggcctgtaaatgggtgatgtacgcatttgcgattgaagtttgttgatttaccaaggtctctgccttgcatagatctagtgggcatcrgcattaagagaggaagtaaaaaactttaggagaaattccagatctctggggattcctgttaggacctttatattatttttgttttgggagaatttaacagaaagacagtgacaccaatgtcaacaaaaaaaaatgagacagcaaaggtgataaagagaayagatttggggatcatcattttctcttctgcttgagattccacagctctcaacaaaaatgactattatttgtgtatggctctttacaactaacaaagtgtttcccatttacaaggtatttcctgtttaccaataatgtcagatgaaccttacaacagctgtttaaggtgagggcattattattttcactttaccaaagaggaatgaagtccagaaaagttaagtttaccttgtctaaggtcatacagctaaaaagcaaccgggccacgatgtaaccacggttttctggctcctaatctggggctctttccagaagactcacctgagataacatgagccactcacttatgaaccaagagtcatcatccctatgtatagtttcactgtgtttaaaaataaaacaatagggggatagtgactgggaaggggctaatggtatgctggtaatgttctgtttcttgatgtaggtgctagtaacacaggtgtgttcaccttgtggaaagtccttgagctgtaaactttgtgtacttttctgtatatatgtcatactgtaattattaaataccaggcaagccaggtcaggaggcttgcacttgtaatcccaatggctcaggaggctgagatgggaggatcacttgagcccaggaattcaagaccagcctgggtgacaaagcaagacccccatctctcaaaaaaaaaaaaaattcagctgggcgcggaagcttacacctgtaatcttagcactttgagaggccgaggcagacagattacctgaggccaggagttcgagatcagcctgaccaacatggtaaaaccacatctctactaaaaatacacatacacacacacacacacacacacacacacacacaattagccaggtgtggtggtgcacgcctataatcccagctactcagaaggctgaggcacaagaattgcttgaacctggaaggtggaggctgcagtgagctgagatcataccagttcactccagcctgggtgacagagtgagactctgtctcaagagaaacaacaacaaataaaaaaaaattagccaggtatggtggcatgcctgaagtctcagctactcaggaggctraggcaggaggatcacttgagctcaggagtttgaggcttcagtgagctacgattgtgccactgtaccccagcctgagtgacgcagcaagatcccatctctctttttttttttttgagttggagttttactcttgttgcccaggctagagtgcagtggtgtgatcttggctcattgcaacctccgccttccagtttcaagcgattctcctgcctcaacctgccaagtagctgggattccaggtgtctaccaccacccccagctaatttttgtatttttagtagggacagggttttactatgttggccaggctggtcttgaactcctsaccttgtgatccgcctgcctcagcctcccaaagtgctgggattactggcatgagccatcgcgcctgrccaagatcccatctctttaaaaaaaaaaaaaaaaaaaaaaaaaggcaagccaaactgataatcaaaactcaggaacactaagttggatgcgtcacattttttactcaatttctcaaacagtagctacatataggacatctaccagttatataaggatgtacaaaattcttgcacactcaaataacatatccacccaattgtcccaatccagactgtcttagtgatgtgaaagaatctgacaggactggaagtaacagaagcccaggaaagggcggagatttttgttaatgaaaacaaaaatggcattgaaaatggaactatcctacatcatcatcaatgatgagatatctcaatttcagagataacaaaaatgtgaaaaaaaaatggccagtgacaattggaagatactatcaattgtaaaatacaccccaatttcagtgttaaaatattaaaaaagcaaaaaaaaaaaaaagaaagaaagcattttaaaacaaaggaaatatattctaatctcaaaaggtagctcaattgtgggataacagatttgtgaagcacatctccttgtacaagctctttgttttagagataaggacactaaagccttcatttaagttattaaataaccttactaaattaaagctcacacatcagaaagttgataactacaattacaaagctggttccttcaatgctcgttctcctgccactacccagatgcctcctttaaatccaaaagaagatttacatattaattccatattaaaactctattttgactttcatatttctttacttcattaactcactaaaaaataataaaagttaacctttaaaaatcaattaaagctgggcgaggtggctcatgcctataatcccagcactttggaaggctgaggcaggtggatcacttgaggtcaggagttccagaccagcctggccaacatggtgaaaccccatctctactaaaaatacaaaaatcagttgggcatggtggcaggcgcctgtattcccagctacttgggaggctgaggcatgagaattgcttgaacccgggaggtggaggttgcagtgagccaagattgcaccactgtactccagcctaagaaacagagcgagacaccrtctcaaaaaaaaacaaaaaaaaacaaaaaacaaaaaaacaaaaaactaagctgggtgcggtggctcacgcctgtaatcccagcactttgggaggctgaggcaggtggatcgcctgaggkcaggagttygagaacagcctggccaacatagtgaaaccctgtctctattaaaaaaaaaaaaaaatagctaggcgtggtagcaggcgcctgtaatcccagctactagggaggctgaggcagaagaatcacttgaacccaggaggtggaggttgcagtgagccaagattgtgccactgcattacagcctgggcaacaagagcaaaactacatctcaaaaaaaaacataataataattaattaagatgaaacgatgtttaggaaacttcatttcttgcttatacaagtttgttttccttgttcttcaaaaccagtgaagcaatacaaagttagataaaagacaaaattagtaatctcccagcccctttccattcctctccaaggcctcctacaagatgagaaatggtaacatatttttgtgtcccccaaaaacataaatacaaatatattggaaagggttttgttgttctctgtttttagaaaactaggtttaaactttacacattgctctgcaacttatctcatctaacaatttatcaacatctccccaagcatcaataactaaaattctaactcatacttttaaaaagctacataaaagtccatataagggatatccataacgtgttcacatatttttctattgagggaatggctattttcagtgttaccatttcaaacaatgctgtaatgagtatccttgacgtatttcaagttaaagaaaaaaaactatttctacacacatactttccttgttgtcccatgttttgattactcctggtctcatcatcatccctacctcccttgctcagagaatcatcctcagggtccagtgtgatgacagagagcaaagtaacttggagaatgtcaagacaagacatgtgatagttactgttggtaaattggaaatggcctgtcttggctgcctctctcagtcacttgcacatgctatccccctcctccccttacatgtgctccctgttctggtctcagcagctgcttccaactcaactgatgtgagcacagctagctacyttgtcacactcctaaycctggcaagtgcagacaggcccaggagctctccaaacaattggaaaggagaaggaatacattatcactgtgaaataatataatacggaggtatctagagtaaaatgtaaaactccctcttcattaagcctcaacccacatttgccagtgacactccccagctcagaagtgaccactgttagaagtctgttgtacaaccttttggatttttcctaagcatgtacacatacaggtatatattcacatacaggtatgtgtgtttggtctacatatctgtaatcataccatataatatgttctgcaacttgcccttttcaygtamaaatttatttgacatgtttccataccagcaaaaaacagattcctcacatttttaattaattttttttgagacaaagtctcactctgtcacccaggctggagtgcagtggcaccatcatggctcactgcaacctcaaccacctgggctcaggtgatcctcccacctcagcctcctggtagctgggactaaaggtgcrcaccaccatacccagctaatttatttgtagagatgggatttcaccatgttgcccaaactgttctcaaactcctaggctcaaacaatccgcccaccttgtcctcccaaagtgctgggattacaggtgtgagctrtcatggctggcaattccttaaacttttaaaagcttraaaaaatcctatgtaagaatgtgccacaactttattttcccattttgctacatctggacatttaggttgttcacagtgttttgcatgtcaaagaatgctgtattgataacactggcagcacatctctaattttacacacaagctaatatttctctaggatatataccaataattagaattawtgggttgaaaagcttgtgtattttaaatgtcaacagatattcccaaattaccatctaaaactgtgtactagtttatagtctcaccaacagaggataaaaattcccatctacacccttctaccaatatattttatcaatatataagatagaatatattattgttttaatttatatcttatttccagaaaagttaaacatctcctcacatatgcaactgttcattcttatttcttatgaaaggtattaccattttgattttaaacatgagggttcagagatgctagagtgacacaaccagtaagtccagacatcaaagctgtttttttaacaatttcccatcaaaactaggcctctttctgtcaagtgtaattccccctaccagcagccagcaaactatggcctataagttagcagcccatattttgtaaatcaggttttactaaaacgtagccacgcccattcatttaagtattgtctatggctgcttttgttctccaatggcagaggtgagtagttacaaccacatggtctgcaaagcctaaaatatttactactggggtctaaacagaaacaataacttgcctaagcacagtgactcacacctgtaatcccagtgctttgggaggctgaaggtggtggactgcttgctgtttgagcccaggagttcgagaccaacctgggcaacatggcgagattccatctctacaaaaattagaaaaatagccagttgtggtggcatgcacctgtaatcccagatactcaggaggctgaggtgggaggactgcttgagcctgggaggccaaggccgtggtgaactgccattgtgccaccacattccagcctggaagacagagtgagactccatgtcgaaaaaacaaaacgcacacacacaaaaaaaacaagagttaaaaactaaagaaaagctcargtctgggcacagtggctcatgcctgcaatcccagtacttaggaaggcttagcgagaccccatctctacaaaaaataaaaaaaattaggctaggcacggtagcccacacctgtaatcccagcattttgggaggccgaggcgggcggatcacgaggtcaggagaatcgagactgtcctggccaacatggtgaaaccccatctctactaaaaatacaaaaattagctggccgtggtggcgtgtgcctgtaatcccagctactcaggaggctgaggcaggagatcacttgaaccaaggagttggaggctgcagtgagccgagatcgtgccactgcactccagcctggcgacagagcaagactgtctaaaaaaatttaaaaaattaaaaattagccaggcacagtgctgtgtgcctgtagttccagctacttgggaggctgaggcaggaggaccccttgaaccaaggagttcgaggttgcagtgagctatgatcacaccacggcactccaaaatctgggtgatagagcaagaccctgtctcaaaacaaaaaaagaaaagcttctcagtggggattagttatggtctaattggccacagccagagcatggctatgttacagtgtgtggctcattttcaaataactttatatgcagtataggtctggtatataatcccaaaggaaagagcccaaaacactcaaatgaagtcaaaagacttatctttacttatgggttgcaacactaaaagattttctatgcactactcttcgtcttccttgtttcttttctttttttttttttttttttttttgagacagagcctcattctgttgcccaggctggagtgcagcggtacaatcacagtttaccacagcctcaacctcccaggctcaagcgatcctccttcctcagactcctgagtagctgggaccacaggcaggtaccaccacacctggctaatttttgtattttttgtagagacagggccttgtcatgttgcctaagctcatctcaaactcctgggctcaagtaatcctgcctctgcctcccaaagtgctgggattataggcatgagccaccatgcctggccccttatttaatttcatctggttcctactgtccttcaatgattttgacaatgtagttcctacccacacaccacaataatacaaaaccaaagcaaactccactatgtctgctgctaaacacccccaacaaacacacatacacatcacaccacaccacacaacacaacacaggtgtctccttcccttttgctagcagattcgctaggaagcagctgcacatttccagcaagtcgaacaaactgctgagagctagggcccctgaccattgtgggaaaggaaggccaattctcccctctagattgtacccttctgaagatcctggccatgaaagaagtcatttctccagagaattttaagccattcagttcctatacggcaggcaggaaaggtgtcatcctccccatatcatcagtggaggaactcagtgtaacttgtttcatttcctcttacttcaaaasgtcattttaagtaatagggtcatttaggtaatatcagtgatctttttaatttctcctcgcattctctcccmaattttggttttacaaaataatggttaaaaaaaaaaagctatcatactctccacgaaatttaacttaatctagaattttgaatgagaaattaataatcaaagaacagtgcattttaggccaggcgcggtggctcactcctgtaatcccagcactttgggaggccaaggcgagcagatcacctgaggtcaggagtttgaraccagcctggccaacatggtgaaaccccatctctacttaaaatacaaaaaagtagctgggtgtggtggtacgcacctgtaatcccagctacttgggaggctgaggcaggagaatcgcttgaacctgggaggtggaggttgcagtgagccgagatcgtgccattgcactccagactgggggacaagagtgagacttcgtctcaaaaaacaaacaaagaacagtgcattttcttacacaaataagcaggtattaagtggttctctggataggaatttggcaatacaaatcaaaattaatgcctataatcctagcactttgggaggccaaggtgggcggatcacctgaggtcaagagtttgaaaccagcctgaccaacatggagaaacccgtcttaaaaaaatacaaaattagctgggcgtggtggcacatgcctgtcatcctagctactcgggaggctgaggcaggagaatcacttgaacctggaacaggtggaggttgcagtgagctgagattgtgccattgcactccagcctgggcaacaagagcgaaactccatctcaaaaacaaaacaaaaccttgatatttgggccaggtgtggtggtggcacatgcccaaaatcccagcactttgggaggctgaggtgaaaggattgcttgagcccaggagttcaagaccagcctgggcaacatagtgasacctcatctctacaaaaaataaaaaattagcyaggcatggtggtgcacacctgtggtcccagttactcgggaggctgatgtgagaggatcacttgaaccctgaaaggttgaggctgtggtgagctgtgatcataccactgcactctagcctgggtgacagagtgagaccctgtctcaaaacaaagaaacaaagaaacaaaaatgttcatatttggctgggtatggtggctcacacctgcactttgagaggccgaggcaggatgatctcttgaagtcaggagttcaagaccagcaatcttctcgcctcagcctcccaaagtgctggtgctaggatgatgggtgtgagccactgcacccagcctaagatagtaaattttgttacatacatcttaccaaaactcaaaaaaaaaaaaaaaaaaaaaaagctggctgggtacaatggttgaagcctgtcatcccagcactttgggaggccaaggtaggaggattgcttgagcccaggagttcaagaccagcctgggcaacacagtgagaccatgtctctacaaaaaatttaaaaattagccaggtgtggtggcatacacctatagtcccagctactcaggaggctaaggtgggaggatcacttgagtctgakcctgggaggctgaagccataataagctgtgatcataccactgcactctagcctgggcaacagagtgagatcttgtgtcaaaaaaaaaaaaaaaagaaacaaaaagaattaaaaaaaaaaaaatctcatgttctttcatcaaataattccaatcacagaaataaaagtttaggaaataatctgaaatacaaagatatatggacattaatagaattatttatcattctgaaaaactgaaggaaaactaaatatctaacaataacttaaattatggcaagaatatacatatgatgaaatcttatgcagtcacttaaaatgttttaaataagtttggctgggtacagtggctcacgtctataattccagcactttggaaggctgaggtgggatgattgcttaagcccaggagttcaagaccagcctgggcaacatagtagactccacttctacaaaaaataaaaataaaaaaaatagctgggcatgatggcatgcgcctgtagtycagctacttgggaagctaaagcgggaagatcacttgagcccaggaggtcaaggctgcagtgagctaggattgcaactgtaccactgcactccagcctgagtgacagagcaaggccccgtctctggggaaaaaaaaaaaagttttaaataattttaatgacatggggaaatactcaagaaakgttgaattttaaaagcaggatataggctgggtgcagtggcatatgcctgtaatcccagccctttgggaggccaaggcaggtgaatcgcttgggctcaggagttcaagaccagcctgggcaacatggtgaaaccctgcctctacaaaaaatacaaaaattagccgggcatggtggcatgcacctgtagtcctagctatttgggaggctgaggtaggaggattgcttgagcccagaaggttgaggctgcagtgagctgtgatcgtaccactgcactgaagcctgggtgagagagtgagaccctgtctcaaaacaaacaaacaanaaaaaggcaggataaaactattatggtatggccccatttttgaaactatatatacaaatatttatagacagatagatatatcatatacatatttatccctctccccacatacttgtgagtttgtatatgtgtatgtatacgtgtaaggaagtataccaaataatgttcatttctgagttgtggaattatgggtgccttttactttcccccttaacacattatttttcatgttttctaaatagtaccatcatatacaattaggaaaaaattactttcatattgtttaatctagtaatctatttgtagatatgtatcataagaaaataaccaaaaacgtagacaaaaacttatgcataataatgttcatataaagatacacagaaaactattaataaataatggttacttctgcagggcagaattagggtaaagacttatttggggacttatttgttatatctattacaaaaatgatttgaaaaaaattccattattatttgaaaaaacctgaaagcatataaaaatcctatatgatagactattatgcagccactacaaatatttatgaagagtatatataaatttatataatgaaaaaatggtaaatggggaaaaaagcagaatataaaattttaggtaatatatgatctggaaattgcaaaaccagaaatatacaagcacaaaatactgaaagaaaataggctaaaataagaacagtagttttctccagatagtgggattacgggtgatttcagttttcttccttatacttctctgcgtttttcacatatcctagaatgaatatatactatttttcaatcaggcttaaaaaatgtttttggtttctgccctataatgaaaagcctgctccttgtgtgaaattttatccacaaaggattatcagtagtaagcaacccactagcaagaagactgttcataatgtatatgcctaagaaaatcatctttggtgggtcagtgagctcagtttaaagggacacagctctgaccacttcctgccttcttgcttttggagttgttttagtaaatataactgaggaatcaagttctcaaacatgagatgcctgacaaacttaatactgtactgtaagaaccaggaccaccaccttctctcaacctaacctytaagactttacacttaagaatagacaagaccgggccgggcgtggtggctcatgcctgtaatcccagcactttgggaggccgaggtgggcggattacctgaggtcaggagtttgagaccagcctgaccaacatggagaaaccccatctctactaaaaatacaaaaattagccgggcgtggtggcacatgcctgtattcccagctactcgggaggctgaggcaggagaatcgcttgaacccaggaggcgggggttgcggtgagccgagatcacgcctatagcctgggcaacaagagcgaaactctgctcaagaaaaaaaaaaaaaaagaatagacaggacctaaataacatagattgggtcatgttagtctgtaaatcaaaaacacttaacagctaattacatgaagaataaaatccaaatttcttagcataacgcttaaggttctctaagatccaaccctcaaatttccttcccagcctcatcttcagttcattccctaaaatatcctctacctcaggcacattttccccatacatgccaggcattttccaagctgtgtgcctttgcccatggtgtgacctccattaaatgccctgtctcctaaacctactgaactcctattcttcctttacaacctggctcaaatgccttctcccaaactctccttatcgcccccaccatcaggaacaattgttctttcctctatgtgctcccatattgcttgttcctctacaaacttaattacaatcctccctgggtggatgctagctgtaatacttgtttcattttactaaactcctggagggcagaaaccattttaaaatcatttccactccagcacactgcttgcacacagtaggtactaaatatgctgcctgagtaaatgacagccaattggcccttatctgaattctttcagtggtacagccagggatggcaaattgtcaaagctagtccctctaattgcaagttatacatatagcatgagtgaccagcagaaaatgccaagggcctgccactttaagaggactggcaagaygactatgtttacacaatcctaattaaaactaaagggcaatgagggaaagaagagaaatagggagattaagaggtgtggattctacaggtcacctcctcttcttagtgagcttgctaggcactaggctggaagatctgagctacaaagtagcctattttatctttggggtagcctgtaggatctaagtattgaaaagcaactaattaggccactttgtcctccagcaactggccctgctcttgggcattaacttccaactggtacacaaggctttttctctaaatgaatcccactgtaccaatcactaggagaatccctttaaaaaaggcttgaaattaataacagcaggaaacaaagtctctcaatcctctgaatcacaatatccacactgtccattttgatgaaattcacccccacctccttcaaacaataggtcctaccaaggaatgacttctctcaggaccaacatgtcctgtgattgtttttctggagcaagcttccagtgcctgcttctcattaaatagctacttaatgtctgatcacccagctgtgactataagtagagagtaaagtaactataatttaggargtaaaaaagaaattccactcctaccccaagtccagtagtcaaacagcttagaatagacatttccctacctcaaaccttcttaggcttatccaattttcagatctagaatttttagcatctcttaactctttcaatataaaaatgaggaaaacaatrtytagagtaagaaagagaattgcaaatgattatacagtaacttagtcacagaatcttttgaccaggctgtctaacacctcatttaactgatgagttttcaagaccactgtttccaggaacaggttacagggcactacaatataatcagcttaatttgcatatattcaagataacagcccctaggcttgaccccttcaccatcttcctgcctaccttttttcaaacccacaactgctaacaacaacaaaaaaatcaatgtagtgatttaatacatcatttctgcctaaaaaaagactggagctaccaaaccatctgcttcagcctcaccacctgggattcatcttgattgatttgggtgtgttggtgggcagtggctgccacagcctgaagaactcttccaactctttctgggggtcttctggagatgggactgcaatggctcctcagctgcagtttcctatagagcaacatgttgaaacacacttgttccctcaacacacttgtgtttcagccctcaacacacttgtgatttgggaggagtaccaggagaaagaccagtttttggcagggcgcggtggctcacgcctgtaatcctagcactttgggcggccaaggcgggtggatcgcttgaggtcaggagttcaagaccagcctgaccaacatggtgaaaccctgtctctactaaaaatacaaaaaattagctgggcatggtggcacatgcctgtaatcatagctactagggaggctgaggcaggagaatcgcttgaacccgagaggtggaggttgcagtgagctgagatcccgccattgcactccagtctgggtgacagagagagaccctgtctggraaaaaaaaagaaaagaaaggccagttttctccattatctagtcaccccaacctataagcaagcatatgcacagtcactataaaggaaagtgacttgttttccagcagacatttctaatcttattaaatcaaatgaaaactgcaatcaaaatactctccttaggaagttatttacttattctaacaaaacacttctttgggagctgcctttaaagtctactccatgtgagacaaacagaaaaattcggtgttactgttttatagtcacacctcatccttcaccaaaaaaggtattgccttgcatgaatctttggctcacggcatcttctggctgtttctaaaaattgaatccaccaagctaagagtaaagatttgctacctctgaggatattcaaaagattggctcagaggcagtctgaggcaatgacaccatcaccaaaggaaatctaaaggctgagaacacaattactttgaaggggtcaaacttaaaaacattctaattgccccataattacaatcaagggggcaagacatgtacaatatctgtcacatttgttcaactattatatcactttataattacacattayataatgataaattttggccctggaagaaatcttcaagatcatataatcctaactgtccctttttacatatgagaaaagttcagtccattgaggttaggcaatttgtccctggtcacacatctggttagcaacagtcaggatgagaaacccagacacccaaactcccagcataatgcacccacacatacttatgtatacagctcctcctcccctgcttctcacttccttcactcccctgatcaaaagggacagaaataacttgggacactaaagcacaccaagaatggttctgaaacccagtagcagagaaatgatggcttaaaaaccaggacttctctgcagtggcctcaatggccaatgtttagtgtctggctcacaagagttctgggcaatctacctcagagcaagggccaatgaaaacctctggacaccaccctcccacagttagaaaaatatctttattaaacctctctgctctcctcctacagtaacctgtttgcctcaaataattgaaagacaaagacaatcactttgaagaatctgggtcagggaaaaagtaaatggtagagatcctgctcaggacaaagctgacctatsaaaaactagagggcagaaaccattttgacttacctcctggtggaagcctccacacactagaacagggtgatctccagcagtctggcttagaattagtttccacctagggaaggggcaaagggacaggaatgattattcattcccctaacccacccactcttagtgagctcagcctcacattatcctgggcaaccccagcgttctgtggatcagacagcaagcagaagggaagccatgcaggccaggtcaacggggtgagtcagtggcagagcaggaagagtcactggggcagaaattctggccttctgtggcaagactgccaagccacacccacacttggtcagcactgtgaaggccctgccctgttaggatttcagtctttaagccagaaarcttcttcctcaggaggccccacaccactctcattttcaagtgtctctcctcctgctcaaaaatcttccagttttcttctccctaaagcatcatatctaaattctttggcttaactttccaaatcctccattatatggcctcaagtcatttattcaaccttatttcccactattctacagaatatactctgaattgatcaagccagtcttcccacttctctctgcgtgagccaagccttttctcatttccctgctttcaattatccaggagtggtaaattcaaacatcttcaggggtcaggcaggtaacagaaacaaattatccaggcaaggcccagtggctcacagcggtaatcccagcactttgggaagccaaggtgggcagatcgcttgagctcaggagttccagaccaacctgggcaacatagtaaaactccgtctctacaaaaatacaaaaaattagcyaggtgtggtggagtgtgcctgggtcccacccacttgggaggctgcagtgagctgagaccgtgccactggactccagcctgggcaacagagcgaaaccacgtatccaaacaaaacaaaatgaatgatccagtggggcacatggcagatctaggaaacgctgcacccccctaaaggcattcaaatattttaattcaaatatttatgtagtgtctcactgtgagcatcacgataaccttttaaatagttattaatactctatcttgcaaatgagaaaacttccccaaggttaggtaactggcaaaatgctgggcacagtctctagacctgtctgatgccaaagcaagagctctacaccattaggcttctagcagtgcaaacaccatggaagatacagaaccctcaaagtcacttttcatgatacacaaccttaatagtaggatgggaagcccaaatcacagcttatctaaccatatcccaactgcctccaattctgttcattttccaaaccccatctttctgccaaagtatttcattcctagttatccaagtcctactgaattccttcttctgtaaattcctatagggtttatagattagacaacacaaataagtgctaaattatatactgtcttgcaaaatcagatactgcttctatgtattttagtgtcagcctcatcaatcaaactattgtattaatctatatagttcttctaccaaaaatgcctaacctgaatctaatcaagaagaatcagacaaatgctatgaaagacaaaaaggcattcagattaaaaaagaactgttcaaagttaaagcagactaaagacatgatagtcatgacaactaagtgcataaatacatgcatgatccttcaatgaatcctgaattttaaaaaactcaataaaagacatcactgggaaaagatgagaaatctgaacaagtattatatactggatgtattgaatcaatgttaagtttcctgagtgttaatagtactgtagttatataggaagatacctttttcttaggaaatacttgctgaaatagggattaaataacatgatatttacatctaacagtcaaaaagattcagaaaatgaaggayaaatagacagcaaatttggcaaaatgttaatagtgactctaaatgagaagtatataagtatttgttacattattttgcaaaatatctataggtttgaaaattttcaaaataaaataatttagtaaggagggaaatcctgtattatatacttttttatatactcagctctgtgacagatataataggcactcattactttaggtatctgctcactacctaaggaaactgggcatttggaggtcarcaatcagacagagtccactttgctgcagctcatgaggggtatagtaggaaattcttagggaataagaggtttctccaaaactcacattgtcacaccacaggaaatctagaaaagcaggcaattacctcactcctcattgaggccatcacagaagtacaggcactgaacaaatgcccactcgctaggcagaatgcagctgctgcccacacgttagtacccagtggtaaggtggatacaatgtgacctcagaggaccaagagttgaggtcacattgcatccaccttgccaccgggtaccaaaaatttgacaatctgcaaaacaagtgtctctggccagtcacaggaaggcactcaagtatcaaataaacatgcctgaaatatatgcagtctttcctcctcaccagataaaccagtcctcagctgcaataaggcagaagaaatctgcaaggctgaatcactggtatttcctgtgcagacttcaaagaaactggcccttcaataggacagaaagggcaggcgacacagctgccaacagaggcctcaacccaggagcatgctatgcaataatgccttctctcccttctacagccatcagatacctcatttttayttctgccaaatggccccttattaccgcgactgattacctaatagccaaccctttaccttggttctctcctcccctcaatgagacccaagatactggcctttctagacagctcctcctccaatttgccagaggaattgtcaaaactattcccctggccaggcrcggtggctcacgcctgtaatcccagcactttgggaggccaaggcgggcggatcacactgtcaggagatagagaccacggtgaaaccccgtctctactaaagatacaaaaaattascygggcgcggtggcgggtgcctgtagtcccagctactcgggaggggaggctgaggcaggagaatggcgtgaacctgggaggcggagcttgcagtgagccgagatcgcgccactgcactcaagcctgggtgacacagagcgagactccgtctcaaaaaaaaaaaaaaaaaaaagctgcctaggccaggcacaatggcttacacccataaacctagcactttgcgaggccgaggcaggaggattgcttgagctcaggtgttcaagactagcctgagcaacacagcaagaccttgtctctactaaaaatcaaaaaaattagccgggtgtagtcccagctacactacttaggaggctgaggtgggaagacagccactgcactccagcctgggtgacagagcgagaccctgtctcaaaaaaaaaaaaaaaaaasttgcccacagtaggaggtagaggagaggccattattaagcacactctcagtaaaccatgaatctgacagagctacccaaaacatcaatgcagtcttaagctgcattagtagaagatgactctatgccccacctttgaagagcaaagttagaggacttgcagaggaagaacaccaatgaccatggcaaagggtctagaagtatatcatttcaaatatggaggaagaactacacacttttagccaggggagaacaagaaaacttttttcaaatatacgcatagctttcacatagatgaggagaaagacttatgagtccactataagaatacaaaaccagaactaatgagtggaagttacaggaagactgattttggtttgccacagggaagaaatttcagcatgttgtagaagttcagaatgtgggatgtagaacccagaatgcttggattaggatgtcaactccaccacttataaactgtgtggctttggggagattaatctacctgtgcctcagttgccttccctgtaaaagagaatagtaataatagaacttagctcacagagctttaagaagtagcttccgagrctggctgcggtggatcaggcctgtaatcccagcactttgggaggctgaggcaggtggatcacctgaggtcaggagttcaagaccagactggccaacatggggaaacccgtctctactaaaaatacaaaaaaaattagctaggcktggtggcgcatgcctgtaatcccagctactcaggaggataaggcaggagaatcgcttgaacccaggaggcagaggttgcagtgagccaagatcacgccattgcactccagcctgggcaccaggagcgaaactccatctcaaaaaaaattaaccagacggtagtggtgtgcgcctgtaatcccagttactcgggaggctgaggcaggagaatcatttgaacctgggaggtggaagttgcagtgagcagaaatcacmccactgtactccagtctgggtgatagagagaggctccatctcaaaaaaaataaaaagaagtagtttctgtaaagtacttagaacagtgcctagttcacaatatacgctggaaaaaaaatgttacctattgctattactaaatgttgatacaacagaccaggctgggtgtggtggtttgtgcttgtaatcccagcactttgagagaactgcttgagctcaagagtttgagaccagcctgggcaacatagtgagacctcgtctctactaaaaataaaaagagttgccaggcacagtggcgtgcacttgtagttccagctactcagcaggctgaggtgggaggatagcttgagtccaggagatcgaggctgcagtgagctatgatgacgccactgcactccagccagagtgacagagcaagactctgtctcaaaataacaaacaggctgggtgcaatggctcacgcctgtaatcccagcactttgggaggctgaggcgggtggatcacctgaggtcaggagttcgagaccagcctgggcaacatggtcaaaccctgtctctactaaaaatacaaaaattagctggttgcagtggcacgtgcctgtaatcccagctacttgggaggctgagacaggagaatcacttgagcccgagaggcggaggttgcagtgagccaagactgygcaattgcmctccagcctgggcgacagagtgagactccatctcaaaataaataaataaataaataaataaataaaataaaaataatatacaatacaaaaaacagaccagataacctgaagcccttcctactaaatatgcctagaagtgctcagaaaaatataataaacatccttytagactgtgccagctattaaggtattgtctctcagctccaaatctaccctgttatgctccgctttgtgatgctggggcctggactccactaaaccccatttcacatttgccagctggatccctgtcaacagggggtgctaaggggaaaacagaagacaagagaaggctacaagggacttcctccttcttgtagcctggtgtttcttgacaacagaagttggttcttcccagttgcyttctaaactcccaaaaccagcctcctgcccctcaaaggcaccagcatcagctaagtaaggctcaacagaagccagctcctccaggttcctcctataagggcctgagaaaccagcagcaccaggtaacaccctctccagagaatctgggtacagctattccagatccctctagacttctaggttctggtagccccaaccttcctccctttgtttttcagtcctggatgagaaaaattctttatgcagttattatattgaagttactttaatattccctttctgctttttcagccctccaccaagggtttaaatcaatctcctttatggagttcactctattgtgtggtttctgttttgctgattggatctgaactgacatatagataaactgagctctcaagaaagtaagaaaaatccccaggaaccagaaacaaattagtgaggaggattagcgagctgatgacatagctgtcctagccgtgtatggaatttgtaacaccctcataggttcagaagacagatcttgagtccacaaaaggcactgagatccctgtgcagaggctgagattcttaagtttatactcagtaagataatagactaggaaaaaaaatctgtccagagagaaataaaaaacttgccttgctcacctagtgagaaaggagggaaaaaccgtctaggaattcaaaacaggctgggtgaagtggctcacgccagtaatcccagcacattgggaggctgaggtgggtggattgcttgagcccaggagttcgagaccagcccgggcaacatggcaaaaccctgtctctacagaaaatataaaaatttgccgggtatggtggtgtgcacctgtagtcccagctacttgggaggctgaggtgggcggactgcttgagcccaggaggcagaggttgcagtgagccaagatcctgcaactgcactccaacctgggcaacaaagccagacagatcctatctcaaaaaataaaataaaataaaataaaattctaggaagcagacattaatatgtagtgaaaaacaaacaaacgatcagtggttcctggtatcagggtgaaaggaaaaacggactgtaaagaagtatgagagccgggcacggtggctcacgcctgtaatcccagcactttgggaggccgaggagggcagattacctgaggttggcagttcaagatcagcctgaccaacatggtgaaaccccatttctattaaaaatacaaaattagctgggcatggtggtgcatgcctgtaatcccagctactcaggaggctgaggcaggagaatcgcttgaacccaggaggcagaggttgcagggasccgagattgcaccactggactccagcctggagaataagagtaaaatccatcttaaaaaaaaaaaagcatgagaaatcttttgggggtgagagaaatcctctgtatctkgattatggctgctgtttacaggtgtagacatctgccaaaactcaactttcttgaaaattattacagacacaaaattgaaaacatgagacaaaaacaagatcacgaaaaacaagcagatttgaaaatgaaccaaagagcacttctaataaatgaaaaagttagctaataaaaataagaattcaaaaaacaaattagacctagctgaagagtaaactagtatactagaagatagatataaggaaattatccagaagttaacacagaaagatagaaatggaaattatgaaagaaagaataagatgtagacracagaatgaggaagttcaacatamgttacgcatgagatctgagagaggtaaagaggtaatgattgggaatttttacacaattagtgaaaagatatgaaatttcagattaaggaattactatatgcccccagtatatagtgatttaagaaaattaaattcacaccatgtaatggaagtacagaacacaaatgacagcaaagaagatcttaaaaacaaacagaaagaaagacaggttacccacaataaaataagttaatttgcaagcatagttctcaagagtaacaacaaaaagccagaatttcaatgaaaaaacactttcaaagtgctaagagacaataattggaagcctagtacccagctaaactaccaatcaagactgaaagtgagctgggcacagtggctcatgcctataatcccagcactctgagaggccgaggcgggaggatcacaaggtcaggggatcgagaccatcatggctaacacaatgaaaccctgtctctactaaaaatacaaaaaattagccaggcgtggttgcgggcgcctgtagtcccagctactcgggaggctgaggcaggagaatggtgtgaacctgggaggcgkagcttgcagtgagccgagactgtgccactgcactccagcctgggcaacagagtgagactccatctcaaaaaaaaaaaaaaaacaaaaaactgaaagtgaaataaagattttttaaatgaagacagtgtttaccactaacagattcccactggacaaacatctgaaggatgtatgtatctatgcaataaaaaaggaaggaataaaatgcaaggaaaaatagtgaaaaagcaaacagtagacatacatgggtaaaatgaaataatcactaacaatacaaaacaataaacatattttaattgtgttggggtctcactctgttgcccaggctagctaagaactcctgggctcaagccattctcccgcctgctcctcctgcctcagcctccagagtagttgggatgacagggcaagccaccatgcccagctacaaaataataattatcaattagaattgttcarcttagagatggattgactttgggaatgatctcattctagaaagtaytcattttgagtctggacaacaccttttggtatgtttagtgtacactgggtaagaggctaaattaaatgaccacaccatatattaggttaatgcaaaagtaactgtggtttttgccattactttcaatggcaataactgcaattacttttgcacaaacctaatatcttctgatcatagttttatcaattagacacagctgtccaaacagcccctgatcagctctgttcagccacctgagcagggctttgccctcatcctaaaagttctagaattcaagtcttatttcaaggcattcttcccacttccatgttccacatgtaaaaaagaattctacgtttcttaacgagctttcaggtaagatctttaagcttttggaatgtaccgcttttcgctgtgaactaagagcttagacattacaattagtcatcccttgctagaacttaggctacgaaaagaatactttggaagctttcacaaaaaagtatgtggttcttcctctaaagaagaaaataccacacagaaagagggactgaggaaacataaacccatctgtgctgacagaaagctaccttacatgatcctcatgttcgccccaggttcccatatattcacagcagtaaagatctccacaaagcagagaggcccaactcccttaccattaaagctttaacgaccagacaacccagaagtttggaaacatagaaccaggcaacagatactagagagagggaattatgtattaaagcaagaaaatatcatcacgttttcaagagggagtgccattccagtaaagaggacagcttaatactgaggttcaaatgccactaaatgaaaacgggaaagcgaaattcctgtgccctttcagcccaagaaattattccaaagcatacatttattcccattacatgtcgcaaatcctgcctagccattaggatacagtgacgaaaaagtctctcgttatctagaagggcagacaaacacgcagacttttaaaataccagatggcaggccgggcgtgatggctcacgcctgtaatnccaagcactttgggaagccgaggcgggcggatcacgaggtcaagagttcaagaccggcctggccaagatggtgaaaccctgtgtctactaaaaatacaaaagttagccgggtgtggtagcgggcgcctgtaatcccagctactcgggaggctgaggcagggaactgtttgaacccgggtggcagaggttgcagtgagccgagatcgcgccactgcactccggcctgggcgatagggcgagactccgtctcaaaaaaaaaaaaaaatgacaagtgctaactcagaggtaagcaaaagagagtacccagaggcggcagcatcaacccagtgggctcccgcccacccacaatcttcacacagtcacaccacttatagtcataaatttgtactctccgaggtgcgtgtatgaaacatgttatctgtgagagtccatggatgaaaaacaaaaacaaacaaaaattaaaaaaaaaaaaaaaaaagacttaacctgttttgaccaggacaaccaccccaggaagtaggtaaggcaggtaaggtcattgtttacatatatgaaaagtgaggctcaaaatacactgaccagtccaagacaacgcgcgcccccacamagcaccttccccgtccccatttatgcccaacccataaacccaaagtagagccaacctcgcactggctacgtaacccgggccaagctaaacattataaacctcaggctccccatctttaaagtataacaggtggttagaagattaaaaagataaacatttggcaggtcattgtggacggtgtagctcagaaaatgctgactactgcactaccataactactgctattgttaacgataaaaggcaaagactttccaggacccgacccctcgcttacaagcctttcgggaacttgccctatacccccgaccccagtcaccttcagatttaattccacagacacgcccccaaacagaccctcccctttaaggcaccccccccccccccggctcctccctctcaggcgcctctcctcacaaaccttacccccatagattctgccctttcggactcggttatggaggaggccttccgctcgcagcggcctctccagcaccccttttaggcctgagcacccgcaggggtgcccaggccgcacgccaaacgcgggcccgcgccggttacctggctgcgcgctcccgctctgcctcgcgattctccggaatcgtacctcttcgtgggctcgcgccagcgctgtgagcgcacaattagtttaaactatggccccgccccctcgcgctgccctctgattggcctctgtcggcggggcccgcttaaggacccgggaaaaggaagtttgagggccactgggaaagagaaggggtatcaccgcttccggaccccggcctgtacttgaaggcaaagagaactacaaatcccagcgtcacccgcggccttgaagccccgcccctgacaaactgaaggtcccggtaagcatcgcgtcagtacttatggcgcctgccgggttgtggtgacgaaagcagttgccatggagttgctctgagtaaccctgaggcagtgggacgccaagactggagaggaagcgactgcgggtgagtcgggcgggaaaacaggaaacccgttctaggggacaagagatctatggagaagggaggggcactcacagaacgactaagaaccttcctgctcsgggatctgagatttcccccaccgaccctcatcacctttcacrgcgaacaagatacaacactcacatgggacagactgggcgagggggagcagagggagggataggcgttgagatatayatccatacagatttggggatgcttaagaaccacccccagggccgggagcggtggctcacgcctgtaatcccaacactgggagaccaaggcgggcggaccacttaaggccaggagttcgagaccagcctgagaaacatggcgaaccctgtctctaccaaaaacataaaaaaattagccgggcttggtggcgcgctccagtggccccagctactagggaggctgaggtagaaggatcgcttgagcccggagattgaagctgcartgagccgtgatcacgcaactacactccagcctgggctatagagcgatacctccatctcaaaacaaaacaaaacgaaacaaaacaaaaacaaaacaaaacaacgaaccccgcccccaacgcaaacataaagctcccaaaatcggatgcttcaagttccargcataacctgggagatcagaaacgccctcagaaatggggttggttttcctctgaggaactgagaccctcttccaagacatgcggttagcattagattgagtaaatcgcagtcgctaccctaattctagagatgtaggaaacttcctggggcgtgaagtgcctcattccttcttcttccaaggagtaaaaccccttctcaatctgtccccagattcccttttctccccacaccttctccgtggtccgctactcaaagctctacagttagagcttcattttttttagtactcacgacrgatctattacatttagtaacctacccagtgctttcacagtctctcttttgatactcttaacagctctgtgagtcaaggatatttatcttcatttcacagattggaaaactgaaacccagagaaaagggacttgcccaaggccacacaccaaattagtgacagagctagaactagactccagttctccgacttccagctaagtctctttagcttcagcctactgcctctatagcggaaggacttgttccaaggaacaagttaaactgccccagggaaaaggaacctgtgtggcctactttgtattatttacacttcagctggaatgaatttcagatcctcccctgaaasttttaatggggaaaaggaactagagagactaagacaatgagacttgaacatttttaactaaacaggaaacagaagggctaacacagcacccatgtctgaagtgaccatgattagctggtttctagctggtgactagctggccctgactggtccacttactaccttaaagttctcccaggtttggtcctacgccctcttgccactgcactctatattctcttcttgggtacccctccacacccacaacttcattttccacctgtatgcaaatgtacacaagtgtgtatctcaagcccagccctcatctctaagctccagatctatatagccaattgcctcaacatctcctttaggatacctcaaaggcaacccaaactctacatttctgaaattgaaacaatctctgtgtatcccaaccttttcctccaagcctggatctcttccagtgctcctacctttatccacaatatacccaagcccaaaacccaagttagtacctcttccatttacttaatacctcttccatttcccatctatcactaagtcttatcagctttacttcctgaatatcttttatataggtcctagctaccatcacatccttcctgccttccctcccagccatatttgcgcactgcaaccagagtgatccttcaaaatgcaaagctgatactrttcactctctaccccacccccmattttttttttttctttttgagacagagtttcgctcttgctgcccaggctggagtgcaatggcgcaatctcggctcacagcaacctccacctcccggtttcaagcaattctcctgtctcagcctcccaggtaactgggattacaggcatgcgccaccacacccggctaattttatatttttagtagagacggggtttctccatgttggtcaggctggtctcgaactcccgacctcaggtgatctgcccaccttggcctcccaaagtgctgagattacaggcgtgagccgccacgcccagccagcccccatttaatattaatactatgtggtttcctattgctcccatctctccagcctccagtctaaccatacatattcatccttctctccccttcagttatataacctttaaggtcttcaaaatttccaagtacccttccaccatagaacctttgcatatagcagtcacatctgcctggaatgctcattccacaccaccccctaccccataagttaatttgtacttatcctttagatttctctcagtcacttcttcaggaatgtcttcctgtagactgttcagaccaggtcagatccctcaattacagcaacctcatggccctctcctttgtagtrttatttagttgcaattwttaatgtgtttgttaagcacctactacttgccggcactatgagatacaactgtaagaaaaaatatggtttctgccctgctggtgtttatggacatacagatagtaagcagataattayagtgttacgagtgctaccatggcaatcatagcactacaattacagatttgaggataaaggtagacttctcagaaaagttgaaacctgatctgagccctgaaataagaattagcaaagcaaaaggaggagagaaaaactatattccaagcagacagagctggaaggagacactgttccacttagaggcccagtggcaggtgcagggaacttatggtgagtggttgcatttggctagactgcagaattggagttgaggatgagatggtagtagakgggggtggacaggagccaggttgaatcttggtcctccttttggcacctgggaatataacctcccagaatatattagattatgtggcagatttttcttctttttcttttgacagggtctcgctctgttgcccagactggagtgcagtggcacagtcatagctcactgcagcctcgaactcctgggcttgagccatactcctacctcagcttcccaagtagctgggactataggcgtgagctgccatgcctggctaaatatgtggcagatttttcatagcagcctttgattttttttccaccatcagtccatcatcagaaactctcgggccaggctgttgaatctcctatcagatttatgtgattattcctcaaagcttcctgtgttatcatgttgcaacttgcctgagagagggcaggaataggctagcaacaaatcaaattccaaatgttagtaatttcccaaaactgaaaacagttttctgtcaacttgggattggttaaataaattaagtgaataacattaaagtacgatayatagtataaaatactttgcaactattaaaaagggtaatagtctacaacaatttgaaaattaaaaaataggtttacaaaggaatattgtttatttaaaaatatacataatctaggctgggcacagtggcttacacctgtaatcccagcactttgggaggccaaggtgagtgaatagcttgagcccaggagtttgagaccagcctaagcaacatggcaaaacygtgtctctacaaaaaatacaaaaattagcagggtgtggtgacgtgtgcctgtagtcccagctactcaggaagctaaggtggtgggattgcctcagcccaggaggcagaggttgcagtgagctgaggtagcaccattgcactccagcctgcacaacagagcgagaccttgtctcaaaaaaaaaaaaaaaaaagaaaaccgtgtgtgtgtgtgtgtgtgtgtgtgtgtgtgtgtgtgtgtgtgtaaaaccttattagctatacattctaggttatattcccaaactgttaatggagattcaaactttgagtttctatttgatgtacttcttgtcatttcactttattcatctatcatattagcttttacagttaaaaaacaaaacagttaaagatactgtcaatttggaaatgagaaattccagttccgaaacaaggcaggtatgcccctaaccctgtcattcatcaagttagtcagtctggacagatgaaggtgctggcatctgattacctcctggtcataagccagaatagcagatgggaaagactgactccaaaaacacagccacaggagtaagcatggcagcatcaacactttgtcagttctccccagcagtcaagctctctatgtgacaccttgaagactccattaattccttcatttcttctttcatttttccattgtccatccattttcatttgtccatcaaacctttagtgaatatggattttttttttttttttggccaggctcaatgcagggtaatgatgagaagggagaaagaagtctgagtcttgtccctgtcctcaagcttatagggagtaaacaaagttggttataatgaaattaacagagaatacaactgcttccatttattgagcacctgatgccagatgtacaatagttctcaaggtagggtttgtctccatttcacagatgagtaaacaagctgtaataaaattttgtttgaagtacagtgggggcatgcagaagttagctattgccgtgtaataaaccatcccaaaacacagtggcttaagataataaacatttattattgcttctaagtcttagagtcagctggagggttcttctgctttggctgggcttactcatgtgtcggcagtcatctgtgggttgggtgactctcctgatcttgactgggggtaggctgactgtgggctagtctaggatggcttcagctggtatctctggctctttygcatgtctctcacctacacatctcataaccctccagctgatcagccatgttctcatggcactggcaaagagcaagagggcaggcctcctttaaagcttctgtttgcttcatgtttatcgacatctcattggctaaaacaagtcacatgtctggtcccagcatcagagtgagatgggactacaatgttataggcaaaaagagatggatacaggggagaccatgaatagggatcatcaaaacaatcagcctaacacaggacacattaaccaattttatctggaaaagaaaggctttatagaagaggctacactagaactgagtgttgaaacatgagagagtattcactaagtgggcagctgttacttggaactggatgcaggctggtttaccacaatcaatagaaactcagcaggtctttctgtgctcatgacagggttctattatttgtatcttggcttcatttcttctggtcaggcacagagcagcaagcacwcaacaaatgtttgctgaattgaattgaatatcttactgtgaacaaggtgtggactgaaacagctgaacctgggaaccaattgttagaaagaacagcttagcatcaactcttctgaaacagaaatcctcagaattggcagtttctcattcattcatcccacaaacattttgagtgcctgttgtaaacctggttctatgttggataatgaataagatgcgatactagctcacagcctgggctacagcttaaatgcagaaggctaaaaatttaaccagcttcttggggctccatttttaatactaatycattcagaaaatgcaacaggagctggtgctacacaaaatcagaagtctttaggaactgcactgggttgctctgncaagaaaactaacagtaaaaatctgcccttaagtattttaagttaaaatccatgttcagtggtgcataactctggggtaccaacccagtatttactttgagaaaagtatccaatcttgctcaaaggtatcaaatctgytgtaggtgctgaagtgggatgagcttctrtctaagctaggttcctctagttctgtagtagacagccaggttcctctatttttacaaaagaataatgtgttctttgttgtctgcctgtagatttaatatctaaaagattcaagtctccctaattgacaatccatgcccatgggaccagttcataacagaattaagctgtgaagtgactcaatctgtcacctccccaaagctcagctggtactgctattttttcagaacaagacattcattttcctctaaacctactaaacttgatccatgtatatgttaaattgccaaaaaaggaatttacatgaactgtattaggcttaaactgaattataagatatcaggtccttggtttttaacagaaattcttttttttttttttttttttttttttttcctgagacagggtctacagggtcttgctctgtcgcccaggctggagtgcagtggcacaattatagctcactgcaacctccaacttctaggctcaagcaatccaactgcctcagcctcccgagtaataaattccattttaaagttgtttgccaatttcattgtctctgcaaactaatttatcctttgaatccaatgatgagaactgcaatcccaaggtttctctttttgctttggctgccaggaatttcagagctaaatgtaggcttagattcttaaagtgcctggcacatctctctcttcctgtaatctagtttctgatctttctcttccatttttaactttctaatctgcactgtccagtatggtagccactagtcacgtacatttgacaggtaggctagtccaaattgggatgtgctgtaagtgtaaaatatctcagtaagttttaatattgattacatattgaatgattttttgatatattgggtaaaattaagttattaaaattaatttcaccacttcattttacttattttggctactagaaaattttaaattatatatatggcttgcatttgtgacattatatttctagtggatggcactattctgcaaatcatctgttttatgactgtgttattattgtaaacctgaaatccttttggaaagcaggtgaagtaatacaaataataatacaaaggtggcagcagtggatggaatgagaaaggggaggtcgactgggrcaagttcttgtccttatccttgtcaatttgtcttttgcttgtgtgattcacatacaaaccccttggtaaagtgtgttgtcagctctcttcatcccaggtgagtagtattctcatggctctcccttgtctccagaaaaacctcagctttactttagctaacaaattggaaacgatctgataagacaattcacaccacattgcaagtgactgataacaacattgtgttcatccctgtcagggagtatttccattttaaccggaaacaatccctgaacccacaggaatgaatgcctaatggtggagtttcagccatcagtgacaggtgagtgagaggtagactctggttttgtgtgtgtgtatgtttatatgtgtatggctacattcaggatagggctgaaagtagggtatttggatggaaaggtaatggggctggcagagaagccaagcggagaaggtggcaaatccccagctgggccagactgagaggggtggtgagacaccaaccagatgcggtgcaggccctcaaggatttgttaagcaatagaatagcccagttgatgtcamcagagggtgggtatcaagacagtctccacagtaactactgtagagtaacagaaaaggtctcagagtaggattcaggagattatgactgcagtctacaactgactcactggcttaactctgggcaagtccttttaccccttgggtttcagtttcttcatctggcattttccagacaaagaaatgggtgttcgattctcaaatgagttctaagagatgtgaaggtgctctgagaagtagaaagtgctctatacatgcaaggatgcaaggaagagtgatttcatatcttaaaatggaaatacagccaggcaggcctagagtagtagaggacagaaagcagggatggaggactatggggaaacctgaaagccggtgtacttgaaacactggtctttctctgtcctcccaggctgaacccagactcccagggcacctgcttgcacctttgaatgatggcctgaactatgaacaaacgggactatatgaacacttcggtacaggagccccctcttgactactccttcagaagcatccacgtcattcaaggtcagcccccagagcacagtactccactcactaaggcagcaggcccagtgtggtccctaggaagaaaccataatctacttaaaagcctaaagagattcttcccatatgcttgcagatgtgttgttactgtcttttggagggtaggggagagtgagaggtttttttctgtctttttgtttgwtttgattttgccccgatacagccccaggagatcctaagaacatgtgcccctgtttgttttttttaagcagcaaatctgaaaggaaacagggggctatcacagtagttgatcatctttaaaagaagccaggctacagcaggaaagtcaagtggaagaaaactgggaagccagtctatcagccaatagttttattctcctgtttttacctgaagagaggaggaaaacacaggctcctgtggagtcccagcaagtaggcaaaacctttctcctctgtctgcagacacaagcctaatctgactggccaaacatgaggggtcttatctacaaactggcatatttccagtttaaatacttactgacaaatttcttacactcattccagccaaatccaagtttattccatcatcacctacacttattgcaggttccaacactgtccacactcgctcccattttgccattcaatgtctttgtaaatgggtagctagtcccttcaggagggaacatagggaggctgtcagccatgtcatattcccaatgagtcatccgttcttcctagggaagttctgccatccctggcttttgttatctggtctttcattaaagcatcagtccatctgtcctcacagaatacacgttaacatccactatctcagaactattatttggctttagtcttctctcaggcaactggtagccactgcctttaagctcgggaagctggcaaatagcaccagtcttagattgggtttagggtctacttgggttatcatcagccacagtggtaactcacgtttgttctctcacgagcacacagccacctgctgtgatctttattgtgcactgcatcacttctgatgtaatccatgtttcacaaggggttttagctgcaatagtaactatctctaagacaggtgcaatgacagaggtgggaaggaagtatacctcctacctatcatgggaatttctaactctgatggaggaggtgtagctctgccctctatggagtcctcagaattgggagagagacaagcagtaccaagggtaactctacatcacaaaacgtaaatggtacagatggcccatccttcattcaaccgttcaatatttactgagcacttactaaaagcatttatatatgtgtgtgtgtgtgtgcgtcatatgtatatgccaggtattgtgctccttgctaggtatgtgaggcacatcaaaggcccaaaaggtcagagtcccttcagattccccagagcttctgaaacacttatttacagctggggttaagggatacaatagagtttgggggtacctggcacactatttggtgaatgaataaatattacagaatctgaaacggcagtgcctttggaaggcatctaatctgtgctaccatcaacccagttcctctaacttttcacaaacctagagtgttaaggaagtcccccaccatatacacctaccaacaccttccagttggtggttgagggatgacacagggaagttcaatcaaactaacttgtattctgacacatggcaagagctacatggcagcctttcagagagaggaaaacaggaacatagtttcccagatcttcctggagctaaatgctccccagttcccaaagcattgatatttgtggtccagcttccagacctgctttggcctactctgaacaaggaactttacagattcttaggcagtgtagtgcattggtggaatctgagaggagcagcaacctgtggcagcctggatataccactccatccttgrtaagagcagctccagccagcatcaagttttaggcaactctgtcccaccagtgattccctctgagcttggcctccaccccatgcttggtggcattccccaagctgctaccttatcacatggggcactagttcatgtggggttattttgaccttaattttgattcatctgtgtcattctgtttcagggttctmaggaggtrtggggagggaagcaggattaggaattcatgagctggggtacgccgttccagtaccctcctgcaaccccaggccccaattgtgggtcctgctcactctaggattaaggcagagagccatctggtggatgttgcctgacctgcatctgaggaggaggagaggtgggggtggaagggcaaagggtgtccttccagtagagagcagaagagagtgaagaaagctggctagcttccgcaaatactaaatacttccttccccaggggtgaactagggaaccaaaggcttagcagcaatgggaactggacctcattttgaaaaagtgggagtgaggctttggggtgttccatacaccggggttctaacataatcctattccctattctctctcctcctcagccaaactttctgaggatgttgtttatgctaactgcttatatccattcactctttttttggtagagacggggtttcatgatgttgcccaggctggtctcaaacgcctaggctcaagcaatcctcctgtcttggcctcccaaagtgctgggattacaggcatgaaaccagcctccattcactcttgaactcactcacttcmatctggcttctgcctccaggcccttgccattccactgaagcagcccttaccaaggttaccagggacttctaagttgccaaaattacttttcagtccttacctccctggaacttactactataaactatttactccctgaacatctttaaactgtcctctcctgattttccctgatcatttaacttctctaatggattcttcttcctccctgaccttcctccctaccctcactctccctgaggaatctcatctctttccctaacttgtatgccttctatgctaatgattctcaagtctgtgtctcctgagcttccgaccttcatctccaactgcctacttgacttctccacctttttgtacaggaacctcaaatacaccaaagctaagcctgaactcatcacattcccaatgctatttcttcttctgtaattccttaccagttaatacaactggcaaccaccctttaatattcttctacctttacatccagtcaaccaaattatgttgattgtagggccctctcatgtcttgcttggatgactcaaacagccaaattggtcatttggtccaactcactccctaaaatccatattccacactgacacttaagagtgatctttctgaaataaaagatttgaatcatttgctttaaacactccagtgccttcccattacacacagggtaaagcccaagatccttagcctgacatttgagacttttgactggattcctgcctccttttcctctctgtcccccttgtgcagtgcgtgcaagcacttgtgcaggcacacaaacccgccccagactccctggctgttctgtacctctatacctttcttcatgctgttccctgcctgtttacccttctttgcctgataaacatcccctaatccatggagattcagctcaggcttcaccttccctgggaaacttccctgagctcccatactgggtcaatagcctctcttctgtgctgctacaactattatatagcacttatcacaccatrttgccagcttgctcccatcttgcccatataagctcctccaaggcacaaatgtctgctctctgccctattattcatacaaagtctggaacagactgtctctcattttgtttatcactgtatatccagtacctggcatactgtaggtactcaacattmatggaaagagagacaggatatcaaagtgtattccaytgaagtgaattctataggctttaccagtagttaattcaggattttgtgctatcatctactcagctcaagcccaacaattctggttcttagttttcctcaaccccacactggtttggtataaaaaagacccagtggtacagtggacatgagaagtccatgtgacctggaaagccaagagcttgagatagaagtctctggcccttagtctaaacttactgattgctggaagctgtgggacagggttgcactagactcaggcacagggctatggcccttccagaccctccagctacagcctggatggctaatctttccagctctgtcccttcccaccccctaaagccaaaaaagcaaagatratacccaagtctcactttgtccccacagatctggtaaatgaggagccaaggacaggactacgaccactgaagcgttcaaagtcggggaaatcactgacccagtccctgtggctgaataacaatgttctcaatgatctgagagacttcaaccaggtggcttcacagctgttggagcacccagagaacctggcctggatcgacctgtcctttaatgacctgacttccattgaccctgtgagttcctaacagtaggaatccagtcaggggagcctgaagccactttgttcagcccccaacctctccactcctacatgttatcaaggaagtaatgaggcagcatggtacagtccaaagcacaaggctagggggccagacagatagatgtaggttcaaatcctgggtttgcctcttactgactgtgactttgagcaagctacctaacctctcaaaactgcagcctccctgtcggaaaaatggggataatatgccagtatcataaaggttttgtgaggattgaatgaaaatacatgaaaaccacygggcacagcggctcacgcctgtaatcccagcactttgggaggccgaggtgggtggatcacaaggtcaagagagatcaagaccatcctggccaacatggtgaaaccccgcctctactaaaaatacaaaaaattagctgggcgtggtgrygggcgcctgtagtcccagctactcgggaggctgaggcaggagaatcacttgaacccaggaggcagaggttgcagtgagccgagattgcgccactgtactccagcctggcaacagagtgagactccgtctcaaaaaaaaaaaaaaagaaaagaaaatacatgaaamccaacaaacaactggtacatcagaggctgaagtaaaattstaactgtcactgcgcacccactgtgacctgtgctgggttctcctgtggaagaggtagtcaataaagtacagcacttactttctgtgaactcagattcaagttttaagaaataaagtttggccttttctagtccaagatccctaagaggggaaaggagctggagcatgacttggacactattcccctggtgtggtgatctcaatttaaccagtattttaaaagcttcttatgtgcctagcatgatgctctgtcttcctgttgcttgctgtgatagaatcgtakatcaccaaagctggaaaggtcttcagtgaaggggcaactaaggctgagagaggcaagtcagtggcagtgctggtacccaggcccacactcctgaccctcagatcacagctccttttcagtgtgatgccctgtatgtcttaaaacataaataaaagtaggttacagtcatacagtatggctgtggagggttgragtggagggcaggttgttccccacattcttccttctctgcccacgagtcagccctgagcagagattcagggtcctgtcctgtctagcctggcttttggtttccctccccaacaggtcctaacaactttcttcaacctgagtgtcctctatcttcacggcaacagcatccagcgcctgggggaggtgaataagctggctgtccttcctcggctccgtagcctgacactccatgggaaccccatggaggaagagaaagggtataggtaagtgccctgcccctggaggtagcgtctagctgggctcccctaaaggaaaggaggaggagaaacaagaaatctacgaccattcttctgccatgcttggacctgggaagggagtaacagacctctaagcattccttgctctcagtcaggataaacctaatctttcccaaactatgctcaagtccctccattccttgcagtcagggaagacaacagcaactagtggagggggaaggggattctggtgggggtgctggcccccagcctaagtcttccccacaggcaatatgtgctgtgcaccctgtcccgtatcaccacgttcgacttcagtggggtcaccaaagcagaccgcaccacagctgaagtctggaaacgcatgaacatcaagcccaagaaggcctggaccaagcagaatacactttgaggctcccacgaccctagtagtcctaaaggcctaagcatagacagcatggkttgacaataaataatttgagctgttgagcagatgagaagtcacttacaccttgtagagatgttctctaactcaggcaactgcaagtagctctagccttttcttttcttttttttttttttgagacggagtctcactctgtcacacaggctggagtgcagtggcacgatcttggctcactgcaacctcagcctcccaggttcaagagattctcctgcctcagcctccccagtagctgtgattaaaggcgcctgccaccatgactggctaattttgttgttgttgttgttgttttgagacggtttcactcgtcaccccagctggagtgcagtggtgcgatctcagctcactgcaacctccgcctgctgggttcaagcgattctcctgcctcagcctcctgagtagctgggattacaggcgcctgctaccacatccagctaatttttttttttgagacggagtctcgctctgtcrcccaggctggagtgcagtggcacgatctcggctcactgcaaactccgccttccaggttcacgccattctcctgcctcagcctcccaagtagctgggactataggcacctactaccacgcctggctaattttttgtatktttagtagagacggggtttcaccatgttagccaggatggtctccatctcctgaccttgtgatccacccacctcggcttcccccagctaattttttatattttagtagagacaaggtttcgccatgttggccaggctggtcttgaactcctgacctcaggtgatccgtctgctttggcctcccaaagtgctgggattagaagcgtgagccaccacgcccagcctttttttgtatttttagtagagatggggtttcgccatgttggccaggctggtctcaaactcctgacctcaggtgatctgcccacctcagcctcccaaagtgctaggattacaggataagccactgcacctggccagctctagtcttattttgctgaaaaagggaggcaattgagggaaaggcctgctggcctgggacactggagacgtgggtttaccacacagccttgggaaatttatctaactctctgggcccctttgtacttttcarcttagagatttgggggttaaagtagatcagtaatttccaaactcttcacagagtaccagggtctgtagagatgcctcacaggcctccatgacaggccaagaagatggcctatgatctctgaaaccagcccccacttcaatcagatcaaagtaattccattctgttttatatgctgggattctgcttaagatttcatttgataaaaagaatcttctgcttaaaaacatttgcttgctgactccatattaggtattcccagaagagcctggtctgctttctctctccaccccccaacccgccatgtctcccttcacccccaggggctgttggtaattccaytgagtctgaggcagggcccccaagaatcaaagctgcctcagattcaggtctgttcagctttgacagtgttcccatcatcactggacaagggacaagaacagtctcatccagtctgaggttagcccaagccaggtctcagctaagagctgacaccctaaacccttgtctcttgggttcatcttcaatatccctggaagatgtccccttccccccatcttactctcatagacctaagtaatcaaaagtagaatgggtagaacagaggggccagaaccagcacatggatgaatatacttcctttatcgagggtgacaaaccaaaacaaaaaaagaccaaacatgtaaaaacccmgggttctagaaatacaaactcaattcattcaaattcaagctcatccagaccctggtcacaaaccctagtgaggtgcatgtgagcaccaagtcagggagagggggcaggagtgactctgaggccaacagaragggtgggaaggggatctccctaggtcccytggtgatcaccccccacccaaactggtatctccacattctcaatgactatgaagacataccaggctctgtccttttggcccccacccyatccctggccagagcttcaaaggccagtcccaaaaggttctaccctcacttgctcaggcttctarccttcctcttctcctccttcttcacatttttctctgtgattastagcaggttagggtactgtataagccgcagtgaggctgggggccaagggggtggggtagagatgggatgaagagaggagaagagctgtccaaggacccctctcttcatgggatcccaaactgtacaaccagctcctcttttgcrtccacacggatctgagaaagtgcactgtaggcataagcagctatcctggagacctgagacagagaggggccggggaggagaggaacagagacaggtgaggagggcaatcaggaaaaatggggaggggagattagatggtgatggagaaggagggaatgaaggggaacaggaaggcaaagagaaagacagggatgggagagacagaaggaaaagaacaaaggggagtgaaacaataaaggttgcaggaaggagataggaaagacataaaaagttaagagaacgaggtgggagggagctggggcctacaaggctaccaggctccctaactccaccttccctacctcctctgaggcagagtgggtgaaccctctgccataccctgggcagtgtgagaagggtgggcaggggcaggtgaggggtgtctcacctgctgcaaatcagagaacgggatgggctcactggccagcacttggtggggctggctggtaagagacggcagcggtggcagcttcttccaatgggtcaggctgctgctcagcacagccaagcgggtgctgaccaagagagagggggtgggggtaggcagttaagcyacagtctgccctgcccagcccaggtaagcctcatcccctcaggccagagaagcagggtgtcgaggaggggtatctgggagggaaggtctcagctcatcacagactcaatctaggcccatctcccttggcctcagygccctcaagagtgtcacagggtaaacagggctgacatgaataactactgaagcacccaagtgatctgtggtcagtctccagggctgcaccaaatgagaagcttggactaggggccaggctccaaagctggaacagtgatggagggtgggagcccaagtagcctgagggacccacgctggccaggtgctcacctgtactgcctggcacggtccatgtactcatgctgctccatgccctgtragtctgcagcagacacatcaatgatgttgctatggggagaggagacagagatgacatgacaggtgcttccgagaaggacaaacaggactcagtgccaggtaccaactccagggctatctgacaccagtttccctcctgcctactggagcagggctggacatggaggcacctctccccagtgaccttgtcccatcccccatgtcctgagcctggctccttctatcctagcctttaatatggatagaggagctctgacccaggcctggtcctctgacacttacctggctgtcttggcaaggatggaagagagcagggcctgctcatcagtgcgagcggaaggcaggctgtggtagttgggctcggctccattgagagctttggtaggggggctgctagggtccagcagcagcttccgctcctctcggtcctagaagtggtcatgggagagaagtcagccccaggacccgtagatcctgcctttcacgggtgctacccttagcccagctctgaccttaaacaccaaaaatgtttctataaggaatatctaaagtgcccagctttatggaatgccagataagactcagttcctgcctatccttgggagctcaactgagttggtgttctaggataaatgagagtggaaccaggcagtcctagaggccctgaaaaaatggacagaggcacaaagcaggtagtcagcaacagccctggagcttgaaaaacattctaggacctggcaaagaaaggatactagaggctggaagacagwggagctgagacatagcaagcactgggatctaaaggggaaatcagtgcaagtcaagagcccaagaacagccttcctcatcccctaggaccaggccttccccagcaaagctgttcgcttccaagatgraagccctggcgagtccagacaaagccctaggccccaagagaaagcaagcccaacctctccatggccatttctcaaattatgtcagggcaggaatcccagcccagctctgggtcacacagtacaagtgtgttcccttcttgaaggcaggtcccttcgaaggtgttcaccctcctgtgctctggtgctctttttgtacgtgactcccagaaccaaactgagtgtacatggtgtatcctgatctgagcagtacagctgtagccatgtatggtgattcacaccagtaatcccaacactttgggagcccaaggcagaaggattgcttgagtccaggagtttgagaccagcctgggcaacaaagcaagacctcgtctttgcaaaaaaaaaaaattagctggacttggtagtgtgagccctgcagtcccacctacttgggaggctgaagtgcaacgactgtatgaacccagggtttgaggctgcagtgagytaggactgtgccactgtactccagtctgggcaagagagcaagaccccatctcaaaacaaacaacaatggcgctgttccctcccttgctaaaccacctgagtagcccatgtaaattttcagcagccctgttcctgctggcctgtgctgataatcacaacccctgaactaatgtaagaccaaaccaagcttcctcattggtttggtcttcctccttgtcctctttcagtcccctgttctatctactgtaatatttctggatttgaccctgccttgagaccatcagctgcaaatccttgcttgctgtatcagcagtaaatgagaaaaacagacctgctgggtatctatccaacccataaagagcaagagtgccctgaacaaagccaaggatrggcccagggggacatcctggctaatgctgactcaccaaccttcagtgccagactcctcaatgctcccctccaggcctatctcagttcctcagtctttcctgctgcaggccgcagctcccctgcccacaactccacaactctccttgtagagggctacttcctcctgccctgcttagggaggcccagccttttcaccttactcttctttctcaaggctaggttgcccaagtgtcctcaggcaatttgatccagttcccaacagcaagagacagaagctgtgggctttgccccatcacctctataaactcccagacacccttcctccctaaatacataggctcagtattaaagagctaaaaagacnaaatgtttgccaaagataaaactatgtatttctaaggaaagctggctccataatgaggcccaagttagcttcctatgtgtctgtcctcccagctccacttcagacagatcttcctgcaggacagggtagtctcttccctatcaggggttcttcaagaagaaggttggctgatcacttctcagccttcagctaagatcaagtgaacaacaaggttattttcttgaaacccagacttaaagaagaggccatgctacctacttcagagcagacaaacatcaccccactcccaaagtgcgagtggagcatgggttaggtttgtcacatcaaggtttgtctctgcattagtgtaacccaagaggcagggtttcactgtctaccttagcacagacatagcagcctgcccrtgactggccacctggtctaggggcatggctgagacagcttggccccatggataaagtacatggcctagcgtcagaacacctgggcactagcacttctcagcttggccaaatcacttagcttctctgaacttcttcctcacctttcaatagacataacccacactaatatgacggatgtctrgcaagagtcaaattagataactgtgaaggccctttgtaaactgtaacgtgttgtatattttttattatgataaagagacagagatgagagtcggagaggggcctgcccaagaactcaaagagggactgtgggatggtggatggttatggcccttgctacatgaggcctcaaatcacccagcagtgattaagcaccttctctgggtgttaggaacagaaatgagagccccccaaggagaaggtagagattcaggagagcagcaggcccagctctcccttccaagtagaagcttgtatcctttctcatacggcattaatccttcttgactcattccctgcaagagtccatattatgctttaagggacaatttcccactaggctacagctctcccagtaggcagggttattgttgtctctttctcaaaaaggtggaagtgaagtgagaggtattaggcacaacacatgcctaacacagggcaaaggaaatatgtgttcattgggtgtatggagaattgagaaccagaagccacccttgcttcccatacaaacgacattttcctaggcttaagcccttaatccaaaatacgttcactgaagaacgaactacttcccaagtaccagtgatataatctatttttgtgaccatcttccccattagaccgtgagctacctgaaacctttctactctctcaggtctactatatgttcaaatgtagaatccgggcttagagacgatcaaaaaaggagagtagacagcaacttgagacttcatccttgaatgtcaggccaggcagggcagggattagagtgtggggagaagtgagaatgcactaagaggaagagggagaatttaaaactgtacaggtctccccagcctaaccctttctccaaaggtatcagatctacagccaaattctcagaataggcatgtctccagctaaaggaaccctcaggccccaggcagactgcactgaggcaagccaaactcagaaccaaatgaacttcccgctccatttctcttttcccacaatctagccaaagctaaatcctctttgttgcttcccagacaatttcccacatgtcccgatgtcctcactgtatcgattaaatccttcattggccaattcaaaggccaccaacttccagagtcgtcccctggccctagactagcagcgaccttccttctgcaaccccagggactaagacgatacacgaattcctgattcatctcaggacagactaactcagggcctcagcttacccacccctaaaatggattcgcaaagcccactaatacacagaagacacaggaagctggggaagggagtgtttcccggggacctagactgaggatccttgaatctgaaaagttttgaaggtaggagcaaacggaagtggtgggagcgagccggacaggcggctgcctgcacaccccgaggcggggactgtgtagaaatctggggctttaacaggggtaggagcccggcttggcgtctcctctgtaatctgtcccctccaggcctccgtattcagtgagccctgcagtccggctgcccgtcctccgcaggtttctttctgggccccatgccccagtgtcttagccctcattcccgagccccgcctgccgcggccgcacctggtccgagtcctcgttctcgctgctgtagcagcaccccatggccggggtcgggccgggcgctcaggccgcgccgaggagggacggcgtccgtgaggagcccttccggtcacatgacccgcggcggcctcccgcaggcaaccacccgcccccaccccccgtaccccctgtcccggagccgcttggccgcctcagtcaataccccggcttccggtcccgcccgctagcgcgtgatcgttgtcaaccaatgggaaggcgtaaccgtacacgcaagcacgtgatgcggggaaagggcggggcggatcacatgacttcatctttccagtctctaaactggcagtagtggccatcgtgaattgtgttatgcgttctcgtggccactaggccacttttctgggccattgagcgaactcgtaccaaatgccctcgtatgcccttgtgatatactcttctaaatgccatgcgaggggcgactgggatccaggcctgatgctccagatcgtacggtctgggtgcacacacacagatgatccagatgaccagtacctagtcggggaacacagagggtgtatcgcccagctgggctgggggtgaatacacagagggtgtattctccacctgggctggggatctgcgacttacaggaagaagggaccttatactaccttcacatgctgacgcgcagcggagataaatcctggtagaggagatagaagccacctcactgacctctctgctttcaggcttttatctttaattctgccttttttaacagcacccattgtaatcgaacgcacaaagctgaccatcagttctcttttcctaacccccgctccatgtcttcccttgggccctgaacacaggtccaagtccgtccaagattgtatagtgatccatttgttgttcatgagcgtgtgattgggtgttcaccagcatgtatcaaatgtgccaccctcaaatcttgttttggcacattacccgtctgacataacaagagcctgacacctctcccactgcatgttctggggtgaggggtggaggggtcagcaatgtgtttcactggacatagagaaataatgtagtttcctgattgatctactggactttgtacatgcagcctggtctgcctactgtctttactgtcttcgagactcagtacaatgtcctcctgattaccttctctgactccattctctggacatgcccagctccctatgcttaatcctcatccagtgttaattcatgcatttattgaatcaacaaatatttgctgagcgtctactatgtgccacacattgttatatctggatatgcagcagttcacaaaacagccaaagtccctgtagtcatggaacatccaatagtgatcacactatattgtattctctgttcctgggtcagtctcacctaccaaacttgggagttcctggagcacagtgacaggttctgactcttccctgtagcccaaggcatggccttgcttacagaaaacttgcatatcaatgagcatgttacagtcaccccatcaccttggctcaccccatgccccatcttctgatccaaagtattggagaagtcaccagatctcatacctcttataacccctcaaatcaagaccctgaggttctgtaaatcttttgaggttcctgaagggtaggaggcagctcaagctcgtccctggggctggtaacttgaactgcaggtctcaggtgacagcagcagcctcagcatgaataattgaaagccattccagcctcctacctcagggttatcccccgcagcaggccctggactccccgacctgtcctgtgctctggtcctccagcccaggtaagcagggccctggattgtgggttcccaagctcaccagttcaagcccaccgcatcactcacctattcacacccatccatacactctttcatttttactccccgccatcaccaggggccttgcaagaaggccggcaaggaggtcagatctggatgaggaggagaatggtccaggacatgggaggagaggcccattccccataggtccctggagagaagagctgagtagagggaaaatgtgtgctgtgtgttatgtgtatgtacacatttgtgaagggaattctgagacagcacaggagaagaggggaatacagcggagaggagatggggctggagaattattaaagaatcaaagactcctcccatcctcagggaagagcaggcagagggagagtcctggggtgggaaagaggacatctcactctaacaccctatggggtattttgattgcattttactgaggcagggcacagtgatagtgaaggtgtttttgactgcaaatctatgctcttttgctacacagcagtggtcagaggagaccaggcaggcagagggtaggggtgggggaagatatcccagaggtgaattagtgaaaggggtcctgaagaaggggtgacttcaaggataaagagaaacaagtcaggggaacaatgtgaagatgggaccaggggttgggaccgggaagaggtggtttggggctgggtgctgaaagtagacagtatagagtccttgaaagtacacaggcttggaatcacactaacctggattcaaatcccagttctgctctgtgactctggacaaaagacttagcctttctgagccgtggtttgtgaaatataaggataataattgctactggcaaaagctacacaaataggcaaattgtgggtatgggattccctccctacctccctccaccccagggcccaggtagggaccatgtcccctgccattgcattggccttcctgccactggtggtaacattgctggtgcggtaccggcactacttccgattgctggtgcgcacggtcttgctgcgaagcctccgagactgcctgtcagggctgcggatcgaggagcgggccttcagctacgtgctcacccatgccctgcccggtgaccctggtcacatcctcaccaccctggaccactggagcagccgctgcgagtacttgagccacatggggcctgtcaaaggtcagtgttccctagccttctgctccaagaagtacccccaagacagtgaaggaatatttgggatctgttgctgcttaactggatgaattgggcaggttcttgatcctcttttagggcctcttttttttctcatctggaaatgaggagcttggactaagtcatttattcagcaaacatttattgccacctcttttgtattaggaatgtgctaggtgccagggagaggggtagaggccacagagatgaatgagccacaaatgctggcctcaaaggaaccataatacacagtggaataaccatctcagcagataacccatagctttgtaattatctgtctccacatctttcctctccaccatggaggcttccacataccatttagggtagctgtctgcctggatttatctcaatcccagcataagtgcttttagggtcttatttaagaaattcggctgtgtggtggctggtgcctgtaatcccagcactttgagaggccgaggtgggcagattgcttgagctcaggagtttgagaccggcttgggcaacatggcaaaaacccatctctacaaaaaatacaaaaattacccaggcatggtggcacatgcctgtggtcccagctacttgggaggctgaggtgggaggattgcttgagcccaggaggctgaggctgcagtgagctgtgattgtgccactgcactccagcatgggtgacagagcaagaacctgtctcaaaaaaaaaaaaaaaaagaaaaagaaaagaaaagaaattcactggctgggcatggtggctcatgcctgtaatcccagcactttgggaggccaaagcaggaggatcacttgagcccaggagttcgagactagcctgggtaacaaagcaagacccccgtttctacaaaaaatttaaaaattagccgggtgtggtggtgagtaactgtggttccagctactggaaatgctgaggtgggaggattgcctgagcctgggtggtcaaggctgcagtgagccgtgatcatgctactgcactccagcctgggcaacacagcaagacttggtctcaaaaataaataaataaaagttcatccaattccaagatcagaaatacatttgatgagcaataaaaggggaatgaaactacaaattctaacagagacctttcataaatctgaaagatagggtggttgtttctgcctgggacttcatggagaaagagcaacatttgaactgaatctggaagttctgagttggccaggcagatggcgatgggggtgggaagggcaaagccagccacatatacacatgtggcatgaaggaatgagacagcttgatggattctgggcacagttgtttgggatggctgtgatacaggccacaggtgggaagtactgagagatgaacctggaaaggtaggataggatcaggtccaaggtcctgaatgccaggctgagaatcccaagttcaatcccaaaggccttcagctcacaggagccaaggagtaataaggtcagatttgttggaaagattccagggctggtgtgaagactacactgtaggagacggggaccaggagggcagctggggctatggtacaagagacagatgagaccccggctggttgggagctgcagtgaggcaggtaggcatttgagatatcttttatcaggggccctgcatccatctcccatgtcttctgcaacagccatctcccctcataggtcagatcctgatgcggctggtggaggagaaggcccctgcttgtgtgctggaattgggaacctactgtggatactctaccctgcttattgcccgagccctgccccctgggggtcgccttcttactgtggagcgggacccacgcacggcagcagtggctgaaaaactcatccgcctggccggctttgatgagcacatggtcagcctcccatctccccaacccagatttttgtcaccccaggccttgcccccagacatcccttgtgaaggactcccatctaaggagaaggaagcacctccactctggggactgtgatgctggatggtgtgtgagctcctgccctcctgtcccaagtcatctgcacattattttctgccggatgacgaaagaaacagctaagaggaaggtctctggaacccagcaaatttgggtccagctcttactctgcctcttgttagctacgtgaccttgagcaaagcatgcatcctctgaaccttagcttcttcagaatggaaatcacaatactgatcctgacttcttaggttctgaggtcagaggaaatgtgagaacactcatgggaagctaagccaggacctggcatgaagtaagccagatcctggtggggtcttgactgggagaacaattccccccaccctcacctccagctccccctatccccacaggtggagctcatcgtgggcagctcagaggacgtgatcccgtgcctacgcacccagtatcagctgagtcgggcagacctggtgctcctggcacaccggccacgatgttacctgagggacctgcagctgctggaggcccatgccctactgccagcaggtgccaccgtgctggctgaccatgtgctcttccctggtgcaccccgcttcttgcagtatgctaagagctgtggccgctaccgctgccgcctccaccacactggccttccagacttccctgccatcaaggatggaatagctcagctcacctatgctggaccaggctgaggtccaggcccaggggtacttactgatgcccacccccacccccacccaagcagggacctcaaaatcccctccctttcctgtttggggccttgacacacgctgggctcagggctagggagtctctcttcccacctctgacctctttcagcctctacactgacctcaagtgtcaagttctatcaggctgcttggtctcactaggccccctctttccagagagaaccatggactgacagcaagaagcctgagctcccgacccagctctgtcactgatttgctgagtgactccaagggaatccccaccttgctctgagatttaatcttctctcttaacacgaaggaagctggatgggagagctccaggggcctcccagttctcggcctcagaaagcctcccatcctcagcccatgccattctgggtgggatcagaggaagtggcaatgagttagacgccctgcaggaatagctggatgcaagctgggccagagaaaatggcacagaaccctggacccagggccagggatgccctggccttccctaactctggcccacctagccaattaggtgtggctgatgtcccttgagtgccctcttcctaaagcccaaaagaagatgctggactcctctgggccccaccaacaaatagggaatagacatgggtggaaaatcactcctttgtctttattaaagaaacttagaccagacctggcaatcaaggggtgaggtactggccaggaaggtggagtaggtttcaggccctggggatttcaagtgcagactgatggcctgggaggggccaaagagaccagatcctggcagcagctgaggaggtgcccaagggcactttcaggcactggggccatcagctggttctgtgggcaggggttgggggttgggatgcagggtagtttgggctggcctggaatctccctgaggccaccctgccttgtctacctagatcatccactggtcctgatcctgttcgttgccttccatgtccacctggagaggaggctgggtgtgggtggggaggggcctcagccagcctcagccccagatcctgcccctggctggatccagggtttctgtaccccttggccatcaactgggtcaggagcaagggtccaggaacagaggccctcccccataccccttgcctacctcattgacctctccatcatccggtgactcattgtagtcattcatctcgtccatgtcctgcatatcctcatcatcctctgagtcctcttcactatcctcatcatcttcatcatcctcttcttcctcgtcatcatagtgctggtgggcaggacagagcctgtaagccctacaggcctgcatggaccagttcaagaactgacccacttgagcctctctctagggccaatgaatgaccccctaccccgacactccctccttgagtctagcaggctggtgcatgttctgcaggaccttaatgctaggcccaatgcccaccccttctatctccccttttaggcttttacccagatctgagaaccacaactgctctgggtcagagacaggacattcagaattagagcagagcctcggtccactgcggcccccacacaggccccacctgctagagccactcacctctgaggctggcttgccaataggaaccaggttgttgtctttctccgcgatgctttggagctgtgggcaaaggcacagaggaacaaggccagagcccaagtagggcaggtcaggggcatgggactggcccattctgcccagaagacaacccacacgtgttggggagaagcttcctcccagttctcagggagatacaatccctttcttgtcatctgccatttatgaacttgatccaaatacttaaactctctgagccttcttttttttgtataattatggtgaggatgaagtgagagacttatcagcctagaaagcatcatctgctagatcctcaattaatagtcaaaattatttcctgtgctttagggaaaagagcttgggctgagtgtcagcagcctgggctctaatctggcccagaagtcacatggtacccctgtaaaatagggtaccacaagatgagaaccttggctccctggctcccagcccgattattcccagctcagggcaaaaagctcttcctgggtagatttctggagtaaggctgggtcatggcccactgaaggaggtctctgtctgtgctgrggtctctgtgctgtgctagctgctcactcacccaggcctgatgctgctgttcctgctgctgcagctctgtctcttccacacagggtcgatccagattaaaccacagagtctcagtcacacgagggaagagtgaggggaacaaagtggacatggctcctagactgagggaaagggtcaagtgaatgtgttttgctttgtttttgtttttaatttggttgtaatttgatttrgggatagggtggaagacagcaggaaagcagcccctccccctaggaatcagacagacctggctttgagtcctggctccaccacttactagctgtttgaccttggctgagtcacttaacctctctgagcctcagtgtcttcatctgtaaaatggggataataacaattataccactgtcaaagttattctgataattaagtaaataatggatcaacaaagctgtttgcaggctgttcaaggagggatgagaatgggagtcaagtgtagggataggaatccagaatgcagactggcattatgaaattatacaaaattagaggtagcagggttctactgaaactatccctacctcctccacacactaaaacctgctttttgaccctttatgatggcccataccacacccacccagtgtcagaaatttaggacactaacgacctctcatgaatcacagccaaatgtcggggtggagggattgtagcatatgcaagcagggttcagtaagacattctaggaggcatgaataagtggataaataagtagatggaagattgaatggatgaactaacattataagggtacaatcagctttgagcggctgagggagccgaccaggagtgccagataatctgaattaaacttaggacaggcgaactgaggcccagcgacaggcagagactggctttaggtcatacagtgtgtcggggcttagaattcctccgtgaaagggatragcaggagaaaataatcgatgcctggtcctgcttttgtcttaatttatctgaccgacccagggccagccgctgcccttccctgtatctcagattcccaacccgcgtaattaggcacgacggtaaacaccctcatgtccaagaagtactgacagaccagcgatctcggctccgaaagcccaacccaccgtcgcaaagccaccgccctttctttgctcattacgataatgaccatgcagttgaccaacagaaagaaagcagggcgggtctcagacagaaatttggccttatagggttgctaaacgcgaaaaaagcggggcctgggtaggaccaattaactgaaagaaatgctgggtgacaggaagtgacaccaatgaatgacggaccttgtgtgacsgggtggggcttagtctcgaggaagcggccaatgagctggagctctttaagggttaaggactctcaatatggagctcctggggagtcgggtcaaaggaaatgggtttctctgggggaaaaaggaatgaaggggcaaggagacggttgcagccttgcgtctgtacttaccgcgccgggaggctgctgccggcggcgacccggaagcgcttcacccagcctgagcggaagaacccaccagaatccgggactcaccaaacgcatgcgtccttcgtctccttttgttttccccgctcccgcccactaaaccggatgtgacgttgacctaccttagtcacattgttagggaaggaagtgtgccgcgcctacctatctgccccsccttgagtctcagccagtcggcgtctccatcctggcgccagcactacggtctcgtttaaccactgccccgtttaacccctgcccttttgttgccagtcaccatttgcttgttaaccccttctgaagaagagctgacagcaaccttttagtgcgagggccattcgtcctgctgcatcccagaaaactaatctgttactacttcagaattgctggttgatgttaggcccctcctatctgtgctctctcagctacagtttcccgtttgagcatattcattcttttttatttttgctctgaacaaaaatattagagttacaatattactatattccaggccttgctagaaactggggataaatctaggaatatggtcgcttccctggaagacctcacagtccagggaagccaaaccctgcagacatgcagtagacttagtrgtctctcttaaggttgcttgttgagttttgacattggagattatgtacagacttgaatgactagttagcctcaggcacagcattctgttgctgggggaatcagctgccctcctcaggcctgggccaagtacacttagagatcgccctcgtcacctctcccatcctttgctgatgcctctgttctagtaacctctgactcagcttcgcctttagagatactcatgctttctggcaacagaggtccttcaaacccaattcctattaaactccatcacttaccagcctctttcagggacagcagttatccgcatttccagtactgtcctggccagatgtgtgagttttggcaattccttttcctctctctggactcagcttctttgtcaaccagcatcataatctctgcccagccttccttctatcctgggctgatgtgaagattggataagaattgttcaagaggtcgtgtactgtgcatattgaatgtgattatattgccaaatagcactgtttgttatagtttttcattaaagagtaaactttgcctcttggaaatgactacctttttcattcattcaacaaatacctactgagtgccttagtatatgtccatcactattcttagtagtgggtatacaatagtaaacaaaacagaccaaaaaagtccctcttttcatgcagccttcattctgagagaggtaaacaataaagaagatagataaataaaatatgtagttgtaagattgcagtaaataagagaaaaaataaatctgagaagtgggaataaaatatttgcaggggaggtgttttatttcagactggggggccaaagtcactgggaaggtgacttttgagtaaaggtctgaaggagcagagagccttctgatatttgtggaagagcatttcagagagagagaatacaagtgcagagggcctagaatggcttgggcatagtgtcctctagggagagtaataggtaggagatgaggagttggggagccagtggagggttgtgagcacagggtccacacaatctgatttacagtttaactgagttactctggctgttctccaaatagactggggtaggggagacaatggcagaagcagggagaccatttgggagcctattatgataatctagaggtagtggatgagaagtggttgaattctgaatttatttagatggtagagactacaaggtttgctaacagatggacaatgccagaataagaaaggagccacgatttttgggctgaacgactagaagattggtgttgccacttttttgagttgggaaggaatggggaggtgatgaggggtttggtttttttttgacagggagcttaggtttgagtgtgttgagtctgagatgcccattagagtagagatgttggggcggcaggaaggcatatgagtctgcaggtcagggcagagatctgggctggatagatcatttgggagtcattggcatgtagatggtgtttaaagtcatgagactggatgagatcaccaagggagtgaatgtagttggaaaatagtttcctccaatattcagaatttgaggaaactaggaaaagcagcaaaccagatggagaaggaaggccaaaaagataagtagaaagctgggtgagttgatggtatcttggaagccatgtaaagaaagggtggtaggagaaaatggtttactgcagcctcattctgtacaaaattgtgcttttgtttatttccccaacagaccatgagctccttgagggcagggactgaatggttactatgtccccagggcccagcatgaccttctcctggattcctcatcttccttctgtgacctgtgtctccatcagtttctcctccggcatctttttcttacaggattcttacctcaggtaccatttgccccgtccttcctgataattccgcctgctggaaattccctagtaacagagtttcttttcagggtcatcagccaggctcagtaagtaatgatgactggttagctggtgacatttattgagtaccaactgagtgccagacacctttctaggccctggggacagaggggaagcagaaataattcctgccctagagaaaaatagagtatagtgagtactaagacaattatagacaattatagaggagggtaataaatgttaaaatcaatgtatgtagagaatacatgagaacacagaggagggattgatgaatgggttctgaacaaactaagtttagacttttgttccagaaaaggaaacatttgagtgggccttgagggatgagtaggagttaagcccactggtaaataagtaggaaaagagggtgcacaaagaggcatatttcattcaagggcatgtttggagaacattgagaatctgggcagaactagatatgtggagtggagaaagatgagaaagaatgataggggacccagatagggaaggtctttggtggccctatatggagtggatgggatgggatctgggcatcttgggtctcacctttgtcttattgccgacttgctggggaccccaggtagatgtctccccattcacaagcttccgtgttctctaacataatatctaaccatgtcgccagctctgatgtgagtccctggaagggattcccctagcttgatcctttccattcttagatttttacatttgccttatttgtgatttatacaaaccagggcctaggaatggaaagcagggtcaggatggagatttctcaacagaaatcaataaatccagagcccagaggctgaagatggaaaccatgattctatgcagagaattctctaggatccaggaagggccagagttgagtggtgtgaattcagtgctagtgaaagctgcttactcattccttccataaaccttgaggagcatggctgaccctggtaggggacaggggagaatgtaacagtcacagtcactacctttcatacatatggagggatagttggtctccagagagttttcccactcatagtctccacttatccttagcccagccctggggattctgccttcatttagcagatgaggaacctgaggctcaggaaagtaaagcggcttgtctgagttgaagctacaactcaagaatgtcaaaatcttgcattgttccacaaatcttccttatgggctgatatgtgcttgccgatggggactcacagaggaattcgatttgagtcctagtcctctgcaactacccagtatggtgtggataccagactaacgcaagtcattaggcccttgaggccagatctctgtgtgattcatctgtatttccccggcaccttgcacagtgtctagcacagagtagccactcaacaaatgtttatataagatgggtttttttccttgggtctaatggaattatagttcacgtgatgaatggtataacagggataggttctaaaaagagaaaagtgggaatgttaaaaagtgaagagcagtgtgggaggggaggtggagaaggctcctcagagaagatgagaccttgcaagaggagttaggaaagaatattctagtcaagagcagacagcatgtgcagaagtgcagaggcctgaaagggtgtggtgtgcccaggacatggcattgaccgagggcctgttgtgtggccatcgtggtgatgtgcactgtgaaagaaacaggaccaggagacagtaccctgtgctcaaaggacaaggcacagccttggaggaggacagggacatgctgagaaaggcttccttgagcaggggagacttctgctgggtcatgaaggatgcttcatagttcgagtcagagaggaggaaagaggaaacctcccaggtgtgaggggcctccttaggcaggggctgtggttggaaggaataaggagaatgcccaggcaggagagcatggtgtgtggagggcaggctggtcgggtgggaggggctgcagagctccactgggtgggctagctgagggagtgcaccttagcgtggagtataaggcttgttctgcctcatggtcactcaacacctcatttatttcccatcattgtggcctccctggacctgactctgagtttgggatggatagatgcgttggaagggatctctgtgaattatcttccagttccctagaaagccagccccaggagaggtgctccagccaggtccctatctgcatggtggttttgcgtatgtttgcttaccacaaatatatggtaaggtttcctcactaaggtttaatgggctaaggtttcctcactctgactacagcaaaatagatgcaaagtttgaagagaggccctctgcattggaggcaaaggctgaggagacacagacctacacacacacacaccccccctcactttcatgcagaggtggtaggcagaatgaaggctccctggagatacccatgtcctaatcctatggtgtgtatcctacctggcaaaagggactttgcagatgtgattaaggttaaggactttcacatggggtgattatccaggtgggcccaatctatttacatgaatccttaaaatcagataaaactttcccagctgtggtcagaaaacaagacgtgacaaggaagaagcatcagagagattctacattgctgactttgaagatggaggaaagggccatgagccaaggaacacaggtggcctctagaagctggaaaaggcaaggaaacggattctcccctagggcctccagaaagacctactgtcaccctaatttttttttaattttttaatttttttgagacagtcttgctctgtcccccaggctggagtgcaatagtgggatctcggctcactgcaacctctgcctcccaggttcaagcgattctcctgcctcagcctcccgagtagttgagattacaggcgcccaccaccacacccggctaatttttgtatttttagtagagacggggttttgccatgttggtcaggctggtctcgaacccctgacctcaggtgatccgcctgcctcagcctcccaaagtgctggtgtgagccaccgcacccggcccctgacaccctaaattgagacgcatgttacacttgtaacctgcagaactgtaagttaataagcttgtgttgtttgctgggcacagtggcacattcctgtagtcccagctactcgggaggctgtgataggtgtgttactggatagtgctctgtaatttcaggctcttggtgtcctgaacaaagaactggaccagacacacacagatattaagcacagtattacactcttagagggggagagtggactgacctctggcagatgagatcaacattagttttgtgtactctgggtctttgtgtgtgtgtgtgtgtgtgtgtgtgtgtgtgtgtgtgtgtgtgtgtgtgtgttctcttcccaaggctgcctaatctctagccagtgtctgcctttttgattgatagatgtgttgcttagttactttggcccttgtgtgtcacctccatcccataattttaagtacatgagtgatttgcagtccatatgcatgagcttcaatgagctaattaccaaacggggtcattttaaggatactttttctctttaatgtgcatgcccatctctgaggagctgcccgcaacaggtttggtccggatttagcccagatgggggcttctttttcacttttgttttggctgttctggtttttatctcgcttcttgctcacctgccccttcacctggcttctgctccctgcttttactcattctgcccttgatccaaattttaattccctttgctattctcctgctgtattttccctcttcccctgcttcaggaggatcgcttgaaccctgaagtttgggaccagcctgggcaacagagcgagaccttgtctcaaaaatcaattaattaattaatttgtgttgttttaagccacttagcttgtggtagtttgttatggcaccaacagaaaacaaatgcacaggtacacacgtatatcctcccaccctgatagacaaccacagtcatacacgctcaggcagatacaggcagggagacccaggaacatcagctggccctaagtgggggctggggagaaatgaagcttcaggtgtgtgctgcggggtgggtggtaaggcctgctccttggctggtgtggagaaactttgaccacatttctcagtcttaactttgctctgcttcctctcagtccttacgtcatacttttagcaacctttacaacaacattttgtcctaaaccctgttgcaaatacatgtatgaacctcaaagactatatattaaatgaaataagccagtcgcgaaaggacaaatactgtaggattccacttttctgaggttcctggagaagtcaaattcagagacagaaaataggatggtggtttccaggggctggggagtagggagttattactgttttggtatttttttgtttttacagatatcctgtttctacttaaagagttattaccgttgtcaagctgggcatggtggctcacgcctgtaatcccagcactttgggaggccgaagtgggcagatcacgaggtcaggagatcgagaccacgctgaaaccccgtctgtactaaaaatacaaaaaattagccgggcgtggtggcgggtgcctgtagttccatctactcgggaggctgaggcaggagaatgtcttgaacccgggaggcggagcttgcagtgatccgagatcgcccactgcactccagcctgggcgacagagccagactccrtctcaaaaaaaaaaaaagagttattaccattgaccatgaacaacacaggtttgaattgcatgggtccactaatatgtggatttttttcaatcacagataaaaaatacagtattcagaggttgcgaaacccacatatatgaagggtgggacatcagtatgtgtggatttgggtatggggggctcctggaaccaatcccctacatctgttgagggaggattgtatttaatggatacagtttcagctggggaagacaaaaagtgttctggatgagcctggtcatggtggcttatgcctgtaatcccaccattttgggaggccgaggtgggaggattactcgagcacaggagctcaagaccagcttgggcaacatggcaaaactccatctctaccaaaaatacaaaaattagccaggtatagtggtgtgtgtctgtggtcccagctacttgggaggctgaggtgggaggattgtttgagcccaggaggtagaggttgcagtgagacaagatggtgccattgcactccagcctgggtgatagagcaagaccctgtctaaaaaaaaaaaaaaaaaaagagttctggatggattcacaacaatgtgaatgtacttaatgtgagtgtactgaactggacatgtaaaaattgttaaaatgataatttttattatatgtatgttgtcacaattaaaaaaaaaaacaacttgtagattaggcaccattttggagaatgggttcgggggagcctccagtcgaacttccccactgcagtgcagctggaaactcagtaactggttctctgacacctccccgccactcccaccccagtgccacatatccccatctccatgccccactccagtccagagccatctatcgcctgggctactgcaataactggctagcttcccgccacaccacttcaaaccatacgtggctgcctaaaacctttccctggcttcccattgcttttagcctgtgagttgaagtccttgccaggcaagatctgcccctgccttcctgtccaccctcatctagagccaacctcgtccttgctttctgcaccccaaccacaccccaacagttttgcagatcttcagacccactaaaacatgttctgcctcagggcctttgcacaatgctcccattgcctgggactctgtccttcttctttactgggtcagctccctccrttttggtctcaagagaggtcccccctgcagattagctctggtgcaaggagcactcttccatagcatcttctcttttcctcatggcatctcacctaatacatacactcacacacacatttatgtgtgtgtgtgtatatgtgtgtgtatatatataaaacatatattttatatataaaatatatgttttatatatataaaatatattttatatataaaaaatattttatatatataaaacatatttttatatatatatataaaatgtatggtaaaatatatgtaacaaaaaatttacaattttcacctttttttttggacactgagtttcactcttgttgcccaggctggagtgcaatggcgcgatcttggctcaccacaacctccacctcctgggttcaagtgattctcccacctcagcttcccaagtagctgggattactacaggcacgtgccaccatggcctggctaattttgtatttttagtagagacggggtttctccatgttggttgggctggtctcaaactcccgacctcaggtgatctgcccacctcagcctcccaaagtgctgggattacaggcatgagccactgcgcccggccaattttagccatttttaaatgtacagttcagtggcattaagtacattcacattgtgtgtaaccatcactacatccattccccagaactctcatctttcccagctgaaactctgtaattaaacagtagctccccacccagcctccccaagcccctggcacccaccattctacttagtctctatgaatttttactactccaggtaccttaaatggaatcatacagtatttttctttttgtaattggcttatttcacttagcataatgtcttcaaagttcatctatgaagctgttgttgcatgtgtcagaattttcttcctttttaaggctgggtaatagtcatttgtacatatcacatgttgcatatccattcatcttttgataaacatttggattgtttccacttttgggctattgcaaatagtactgctataaaaatgattgaacaaataccacctattttaactatacatctaattgtgtgcttattcgtttaaattgtgcctctcttcctcatctctgggcatcacaagtgttcaccagcatatcctcagcacccagcacagtacctgggcatcagtattcaacaagtatctgttgaatgaatgaatgagacaccaaaatatacctactggacatatacagtgtctgtagtgtgtaaggaagagcagaggacttgaatctggggcccagctcattgattcctcattgcgtgctctgaccttgaccaaggcccttcacctttgtaaaccaaagagtatctgagacaaatctcaaccaatttaggaagtttgttttgccaaggctaagcatgcacccatgacacagcctcagggcgtcctgacaacatgtgcccaaggtggttggggcacagcatggttttatatattttaaggagacatgagacatcaatcaatatatgtaagatgtacattggttcagtctggaaaagtggaacagcttgaagtgggggtgggggtcttcctggtcataggtagttaagagataaccatttgcattcttttgagtttctggttagcctttccaaaggaagcaatcagatatgatatgcttttatctcagtgagcagagagatgactttgagttctgtctattctttgtccacaaattatgaggaaggtgtgtagttttttttctttttaatcttagtagctatttttcttggaatagaatgtgaggcaggtttgccctaagcagttctcagcttgactattccgttagtaattgacttggtcttagtaattgacttttcccatagtaattgacttgcccttagtaattttggggccctaagatttattttcctttcacaccttcaaacctcagtttccccatgtgtaatgtaggggcactatcagccccacagagttcttgtcagggtcaaacgaaacaatacatgtgataaggttcggcttctgacccaaggaactgctcagtgacctaatctagaggccttgatctaagtactgagggagagaggaggctccaactgggggagctgactgactggattcgaatccagcccaaggtctgttacccatcctctggggaccttggctctgtattcatttcctgtagctgctataacaaattactacaaacttcttggcttaaaccacacagatttgttatctttcaattctgaaggtcagaagccataaatcaatgtgtcagcaggactacattccttgtggaagcttccaagaacaatcaatttccttgccttttccagcttccagaagccacctgcatgcctgggctggtggcctcccttccttgtgtccctctaacctcttgtttccacctttatgtgtcctactactctctctgagctcctgcctccctcgcatcaggattacatcaagtccattcagaaaatccaggatcatctccccatctcaagacccatttcttaatcacatttgcaaagtcccttttgccatataaagtagcattcagatgttccagagattaggacgtggacacaggtaccatctctctcccatgtgggcctcagtttgcattttaggaaaataagagcattggtcatgccctgtcctccctgtcacccttgctctgtggagttctacctgaggcaggaatattgggtggaggccagagggttgggtcctgcctgcctgactaccctagcacccaaattctcacaatcttgtcaccagcagttatagccccagggcctggctgtcccccaacccgtgttccagtgccccactgttcccttccatttcctgggtgcttctgattcaggactttttcctggacccttcactggactcacaagaggggtgccctgtttattcagtccaccacgctcaatctcttgcaggagggagcacatgagtgagtgagtgcaggatctggttggctgatccaggtgctggcagcagcaagctccatgcagggccctcggccagtctagatgtgagcgagcaagggcaggatccagccggctgctctgggcactggcaggagaaatctccatgtggggcctgcggcagtgcccaggtgggggtgcccatgacccctaagccccagagggagtattacagtgctctcctagttctgctgtccatggacggtggtgtgttagcagctcagttggccccttgcatcgtctcatggggtggttgccctctgccagcaagggcaaagagccagtgtgacagcctttctgggtacccacacttggtgggtcccgagcccttggccagtgtccaagaagaatgaggttgtgcagacaattgaagaatgatgaaggtggagaattttattaagcaatgaaaacagctctcagcagaaaggggagctggagaggaaacaggaagggccagtcatcttcccccgaagtcaggccatctcttctgtagtccagccatctcttcctcaaagtccggttgtctcctcgaagtccagccatcttcccatctactgactgagtctggggcctttatatgcacaggacggggagtgcatgctgattggtttgtgagtatgcaaaacaggttaaagtgaagacatcactcaaagatgggcatgacagtgtagaaaaccaattaggaaagggtaagtatatgtaaaataggtgaagggtggggatcaatcagaggaaagcacaacaaatgggaagacaagtcttcaatctggtctgaggatttagcttgtagcttggctttcaggctttaaactggctttggcttggaagtggggtttcaccagggaccagtccctatttgcctaggcatttggctgcctcctgtccctctcatttccccctctgaagaggtacaactacctgttgttagaatagggacaaagacaatcttaactacttcctgctgacaggggatgctgttttgagcaaacagcaatcagagctccctcagaggcctatctaagcgtcccaggttaaagggagccatcattcaaggctctgttcggaatttgatggcctctaagtgagaagaaacagtttgggttattagatgacatggatcaaaatggaacaacaaggaggtaaagacagctcaaaaatcccaagtctgctgacatgcccagataactagtggctatagttatgcctgctaagatttggatgcatggtgcttggctttggtttgctcccttgttttcattttcccaaaaaaacctccagattatgagcaccacatcctatttactcctatcagctgcaggataattgcccagaactagaatattgattcatatttttacattacccatcccctctatttcttctgagctacaaccagagatcactagttggttcacaggaataagcaggattaatctaaaatgtaggcaaaagcttaaaaacaactgaaactagaatttaatgacaagtgtatgataaattttgaaacataatttttctctctccagtcctcatttctgttaaaaataaaccatgataggactgagttgtttgcaaaataaactttagtcttatacttggcctggtcatttgcataaagtgcagcaagaataatcattttcacataggcttttaaaattggctttgatggaactctgtttcacaaggaatctcaggtaggaccttttaaagctgagctcagccatgggtttgtaccctcaaatacctatgagttgggtaaattcttcttttcttgaggtcccagataacacagggctcttgggcctgttagaaaatgacattctctactcaccacaggttaggaaccctgtccagggactgtgtagacaaggtatgaggccagttttcccaaggggattttattggctctgcaagtcaagcttgattccctaaaggaaagcataccattccagtcaaaaccttggtaaaataaccggtttctccagttatatcctgctgcaaaagaaaatagattcttattgcactgatgcaaataactatattgccataagttaagaatatttgcaaatagtttccaaattctagagaaaccaggcagagagaaatatgctccaaattttcttcacaggagtataccttactcaattgttaaaagctgtagatagctcaaaagaagtttccttgactctggaaaaaacaaaacaaggatcagcaatgttttaagcaaaaagttaaaaaggattacttcagttttctattagttcagtttattcagttaactcttgttctgcttgatattcaggagaatttcagctctttatgactcctgtatgtttttcctctgttccaatgtcacaatctccaaagtcatcagaaacctgcatttgagggcacctttcaaagtccaatagctgtccacaaatcatcttttgaaaagggtcaaaacaagacaacaattgtctgtgaatgacaaaatatccttgggtagtcacagtcaaaaacacaattgacaaagaaatttgttttttctctgtggtttacaataacttaacacaataaccttaattattactgatagcatatactcagacatttgagttttagaaggcccatacaattaggccgggcaccatggctcatgcctgtaatcccagcactttgggaggccgaggtgggtggatcatgaggtcaagagatctagaccatcctggccaacatagtgaaaccctgtctctactaaagtacaaaaattagctgggcatggtggcacatgcctgtagtcccagctactcgggaggctgagggaggagaatcgcttgaaccctggaggcagaggttgcagtgagccaagattgtgccactgcactctagcctggtaacagcgcaagactctttctcaaataaatcccatacaattttggaacatatattaatattattcactaaaatataccctgaagaaagtcatacattatttttattttggcaatcccatgtaactaaatgtgttaaataatcctgtttacctctcttttggatgctccaggggccttcagtagcatccaaaagttaggggttagaaaagacaaccttgaacctgaagtttgaatttgggaagtctatcaaacacattaaagatttaaaacacttattattttgaaatagaactccagatcaccataagttatttattttagccaaaatgatgactcaaaaattttaaaacaaggcaaaaacctttcattatcctttattattacatgaaaatcttcttcgagagaaagtcaaatttcacccttgcatgtaaatccattttcagtagtctcaattacatgttgtaatggtaactcttagcaatttttaattttaatgtaaaacctggtaagtttttttaattatgtactaggcacagataaagtctgactctttacaacatagttaatggtgtggttaatccatatgaccccagaccttaccaaattgtaaagctggcaagtcaaacagttctcaaaagccaaagaagcagtttataaccttacaacatttagcaaacctagtatctgacctgcatacattagaccacatattttcattttgataacatttgtattttaccaattatcttcaaaattgtttttctttctcaaagattaaagtcacatgaactaaaaggcaatacagcttttgtttttccttcaaaaaatatttgatctaagcacttattttctttaagcaaattagagctctttttttatataaacatcacacacaaataacacatatgtgattacacagacagaagattcagtagttgtaagatttttcatttgccaatctcctaattggattattggcctcagggtggagcatttcaagaagcagagctaggaaagcatgcagtttccagggcctaataaacaggcatagctggaagacaaaaacagattttgaaaggggtctatctgcttttaattcctggggttctataagaaaaacagagtttttttttttttttccaaaatgggatccgtggtgacttctctgtttttcccaaggtgtcttatgctctcagaagttatcttagggcctctcatgcatgcgttaagagtgacaagacaaattggggaaaaataattcagttgactgagaaaaaattgttttgcagagaaacaagatccatgaagaaaaaaacacaaaggccttttaaatatacctatagcttggatatccacttttaattaagctgagcactctttaagataacccttttaaatcccttagtacccaactttagccatgccaagccacgaatatttctggcttttgaactttaccatttctttcaacattttgcacagggagagagaggccagaggcccgactggcagaaaacttttacccttctgtccacatgttcacaattctttccccttctcactccatccttattccactctcagccttcctcatctcagtaaatagccaagcactcctctctaattgctcagaccaacacactctggagtcatcctaattcctccctttctctcatgtcctccatctcagcaaatcctatcaaaacatccttcaaaagacatgacattactcctcccttttcaccacgtccactgccaccacatagccctggttcaagtcatggttgccttaaggctgggccattcacatagacatctgtgtcaattgtttgctttcccttgtccctagagtcagatcagatgctgaactggaaaaagcaaataaagtttccatttcattcagagtaaaatcccccatctttgctgagtctgaaccacggggccctgaagatctggcctggaccccacacctgccgctcccagctcactgctggccacactggcctcctcctcgctgtttgttcctgaaatgcactgagtacatttttgcttcagggcctttggacctacgggtccctctgtctggagcactccttcctccatgttcacatgactcccttcttacctcattatggtatcagcccaagcatcacctcctagatctttcctgtagaagatagtagcccctgcttcatcactctctgtccccttagcctgcttcagttttcttcagagcacaatcatcatctttatttgttttctgtcgtctctctctaacaacctcccacccccaaactagaatgtcagctctatgacagtagggactttttcttggtcacttctgtagctctagaacccagaacagcctagcacatggtagatgcccaataactaattctgagcttagtttttgaatgaatccccacttctaccctcctggtcaaggcaccatcatcccaggcctggacttgtgaaacagctttctaactggtctaccttgcccaattccagcctacacgtaatcccatctgaacacaccaagactgccaattgaactgtgacattcccctgcttaaaactctttcactgtgaccagttgtagaaacaacattttgtttatccatttatccatccgtggacacttgggttgctttcaacttttagctatcgtgaattaatgctgctgtgaatatgactgcacagatagctgtttgcatccctgctttcaattcttttgggtgtgtgcgcacaagaggaattgctggatcatatggtaattctatgtttaattttttttcacagcatctggaccattttacattccccctccactagatatgttattatatacaaaggtggacggctatacaaggacattccctacagcattgactataacagtgaaatatgagaagccacttaaattcaatagaataatgaaatagaatcatatagatctatgtacacagataagggaccatctatagtacattctgttaagtaaagcaagcaaagtgagctgggcacagtggctcatgcctgtaattctagcactttgggaggctgaggtgggaggatcacttgagcccaagacgtcaaggctgctatgacctatgattatgccactgcactccagcctgggtgacagagagagaccctgtcaaaaagaaaaagaaaaaagaaaagaaatcaaaatgcaagggaattaggggttattcttcttcctgaggactggtgccatggcatccagagaaagaacattggtggggatactgatgaaaaagaataaagtttgtagattagttaaaagtattcccttaatgttaatttcctgattttttaagtaattgggctttggttttgtcagatgccaacatttggggaaactggatgaaagcatatgggaaacctctttactacttttgcaatttttctgttaagtctaaaattatctcaaaacactaagttaagaaaatcaaataaacttgatgtcttaaaacaataccaattaggctgggcgcagtggctcatgcctgtaatcctagcaatttgggaggctgaagtgggccgataacctgaggtcgggagttcgagaccagcctggccaacatggtgaatccccacctctactgaaactacagaaattagcctggcatagtggcatgtgcctataatcccagctacctgggaggatgaggcaggagaatcactggaaccggaaggcagaggctgcagtgagctgagatcacaccactgcactccagcctgggggacagagcaagactctgtctcaaaacaaaacaaaacaaaaacacaatacttatttacttatacttcaagattttgtgagtttaattatacttcaagattttgtgagattttgcccaagaatttgggcaagactcatgattggcccatcttggccgggcgtggtggctcacccctgtagtcccagtattttgggaggcctaggttggaggattgtttgagcccaagagttgaagaccagcctgggcaacatggcgaaacctcctctctacaaaaatacaaaaattagctgggcgtggtggtgcgtgcctgtagtcccagatactcagggaggttgaggctgcagtgagccatgatggtgccactgcactccagctggggtgacagagtgagaccctgtctcctaaaaataaaaaataaggtaaaataaagattggcccatctaccctcaacagttgcctggactccctggggctcagtgcacctagatgctggactcggataaccatctgatctttgatgtagtggacagacactttgttcttgccatcatctttggtacctgagatagaaagccttaaagagaggccacgcccatgattaagtttcaggtcaaaacaacgagcaaaaaggcaacggctatagttgtaggtgtagcaaatcagtgtgccttttatctagaggctactgaaaaccagacattcattaaagatattctggtcacttggatgaaggctggccttggcattcacctgaatctttagtagagtctttagcaccattggcaactcagccagacctggccttggccacgatagtggagcctgggattggagggcatgaattttatgaagcctgtaatatcagaaattcgttggttgaggacatacctctttctttttggaccctgtgggcgtaatgctattgatacatgtgcagaggaggaattaatatgactgtgattgacagaataattatgaagtgcaaagacctcagatctgtgatcagcttccatagaagtatttgctcagaagcttctcagaaacattctcatgattgaagaagccttgaagagcccgtatttctgtctatgaaatctcctgtttattgtactatgaggacccatcagaaagtaactgaggtagtgctgatttcctgagcaattattcagtccactgtctcaaatccatcatgcagaatgttcacagagggtaaagtaagtttgactattataactactcacttttataagtgatttaatttaaagattaatatgataagtactctgtttttcctgggaattttgttgtagaaagagtaactgctgtgtggctaaactaaggttataagccaaattgtttcctcagagtttaagaaacacaatactaactctcatgggtttactagttgtctgttgctgcataacaaatcattccataattttgtggtgtattgctgcagacaatgttaaactaagtggatgaaaaggatattcacatagtctcagagtgtctccctacaaggtaggattactaacaaagggaaactaataattatatagtaaggaaatctccttaacccaataatcaccagcaataagatgcagcaaccctcatcatgtacctcttgatatgatgcactgacaaaagcacctctcttctctaattttcttgccaaaatgcataagctcaagctaattacaggaaaatatagacaaacccaaattgagggacattctgcaaaataactgaacagtaattctccaaaagtgtcaaggtcataaaagacaaagacattgaggaactgtcacagattggagggagactaaggggacatgacaactacatgcaacctggaatcatggactgaatcctgggccagagaaaggacattgggggggaaactggtgtaaagggcataaagcttgtagattagttaacagtattgcctcaatattaatttcctgatttttttaagaactgggctttggttacataagatgccaatatttggggaagttgcataaaaacatacgggaaatcttttgacgatgttttgcagtttttctgcaaatctaaaattatttcaaaacaaaaagtttaaaaatcaaatacacatagttgcttgaaatagtaactattttattatattccaagatgttgtgagtcaggaatttggccaaaactcaggtgggcgattcttctgcaaagacccccacaacacattcaaagtcacaggcagaggttgttgggggagggcattgaaaagaagagaagagtcataggtgggtgcaatggagggagggcagagggctgctgactatggtgcaggactcatccataatggagccctggggaggcaagggcttcataactagacactggtcttgtcacctcagactcacctgtagcaggaccagatactgaggtcagactgaaaacacaggctctgcctcaggagaggctctctactagctgagtaaatgatgacagtattggaaatgttcccaacatcataatgggaaaacatcacttcacactacataagcaatacacaggggcagtgccggtcgtcttcccaggttagtagcagttctactgcctccaagagtgttggagaaatacaaaccaagcattaggcacttttaacttgaaaacatgaagttctctttcctaactttctttgtttccttatttcttcttcttcttcttctccttcttcttcttcttcttcttcttcttcttcttcttcttcttcttcttcctcttcttcttcttcttcttctttcttcttcttctccttctccttttccttcttctttttttgctgagacagggtctcactctgacagtacagtggtgccatcacagctcactgcagcctcgacctccagggctcaagcaatcctcccagctcaccctcccaaatggctgaaactacaagctcgcaccaccatacgtggctaatttttctatttttgtgtgcagatgaagttttcctatgttgcccaagtggtctcaaactcctgggatcaagtgatccatccacctcaacctcccaaaacgctgggattacaggtgtaagccaccacacccagcccactaacttttttatatcggctaatgaaatagttttaagtttagaccctacgaggcataaagaaataattttagttatgttatcagatgtacagtaatactcaagtgtgcaactgtggataacttgagttcatgaggtttttgtttttttgtcaaaagaataaatttatagtgaaactacccaaaaaagcaaagtacagaacagtatgctaccatttgtgcacagaaatgggatatatatggtgtaactgcatcgaatttactggatgtatgtccagggaccagaactcttggtggcttcatgttcatacttttgcaagcacatgtgtagtatccttaacttaaaggtactgttgtatacattctagtgttatcaaaatttacatacatattatcaagtcagagaggtcattctgtgtcttagtattttcacttcatatttggtatatttatgtatgtatacacacatacctatatgtatttaaataagatttatagtcacatggtccaaaaatcaaaacaatgtggaaaggtttacagagaaaagtctcaagcctaatcctgttctctactgccaggtgaccatgttattaatttcttttcataccttgccacagaattttcacctgcaaacacagatattcttttcttttttaatgacagagtcacgttctgttatccaggctggagtgcagtggcgtgatcttggctcactgcaaactcctcccgggttcaagtgattctcctgtctcagcctcctgagtagctgggattacaggcatgtgccaccacacccagctaatttttgtatttttagtacagatggggttttatcatattgaccaggctgatgtcgaactcctgacctcaagtgatccgcctgcctcggcctcccacagtgctgggattacaggcgtgagccaccacgcccagtcaacacagacattcttactccttttttacagagaatttattattattattttttacatagcatttttctgcacctttctttttccacttaacaatgcacttgaagatttttccatatttgtacatcaggagctttctctttctttgttaccacattaaattccactgggtagatgtaccataatttaactgggtccttattgaaagacaattgagctgtctcctagacaaagccttgtgcaccttccckaacagagggtctaaccaagcaggcaggatggggttataaagtaggtggggaggtgggagagactccaccttcccaggtgggctgagaatggaggtaaggccctgcaacaggacagagggaaaagtggggatgagaggtgggaggcgagatagcgcccactgttctcgctcagccccctcctccgtttgccgctgacctgttggcctcccccaacctctgagcctgcctctgcctaggtaatttcccaagacccagaaggggtgaagggtgaggtgtgattgcccccacctccttgcctcccgcagcatctgctccgggaccatgaacaatagctgacagctccatggcccttgctgtccccatctcagcttccctgggcatctaaacctcagytgccatggggtaggaggacaggctgaggaagcagaagcctgaggctgtctagagtctcactcctgcatcagcaggccaccacctgtggttcctccttgtgcaaatttgaaaagaattgcataaaacactggagaaatccaagaggggaagtccacaagggcggtggctccctacaaggtcacagagcaagctggtgtcagarcctggacctacagcgctgttggtggaggtcctgcctccaggtaggggaagggctccctctcacctctacacgcagcgcatttcttggctcagctgccctgtaggggatgcagggtggggacagcagagatctgggcctgggagggagagagtacacaatcacatggctgttgcccctgtctcaggccttgtctacctctgactgtggctctctggcaggaatagatggacatggcctggcagatgatgcagctgctgcttctggctttggtgactgctgcggggagtgcccagcccaggagtgcgcgggccaggacggacctgctcaatgtctgcatgaacgccaagcaccacaagacacagcccagccccgaggacgagctgtatggccaggtgagggcagcctggtgtaggacagcatgcacacaggtcagagggtgatggcacgagcaatggcaggtccagtgtggtcagaaccaagggtgccgctgctgacaaggaaggggaggggcggccagggccaccatgccacaggtaaggccactgaggcagcttggggaatatgagctccaatttgaactccaggctcaggagtgtgcttgtatttcattcctctggtctcctggcctgctccctacaaggtttcacattcccagagggctggggatgtgcctagggagagactgtggcgtggacacaatctgtgggttaaagcgaagacaggacagcctggaagccccatgacatctgagtcactcccaacattccatttgcttatttttaaatcggggttaaaaaaaaaaaacaaatacataacatacattttccactttagccatttttaactgtacggttcagtggcattaggtatgctcatgtggttgtgcaaccatcaccaccatccatctcctgacctctttcattctccaaaactgaaatggaaactctgtgcccaccacttcatttgcttttcagaaccttctagagcacatcctccttgccaggaaatggtgtggatgtagacctttgagagagacagatgactatcattctcagggccatgagctatatgagagtgatgatatttgttgagcccttactatagcaagggagttcttctcattgtactcagtaactcttttggaggcaacaacccttgaccctgacaggcaggacccatgtctgccaaaccctaagacccatgatgtgcaaggggtcttgcaggaagaccaagagttggaacatccaaggaaaagcaagtgtgaagtcgggctggcagggaagcatgttctgtgtcagccggcactgggcgtgggccagggtgtgggaggtgggtaggtctggctcccctcccatggatttccctattgtttctcctgggtgctcaggcctgtcacgcctctgccatcacttgaccctaggtgcaagggttcagcccagaaattttatgcaattgaytcatgatttctcaggttttctgartcctggcctagagtgacttcccaagaaaaamctccaccatttctgcttgtcttacctgccttgtatttacctttctaggattgccttttccacatttagtcaagtctaggttcagacccacgtgcaggctatagctccttcgttctccaccactctcaggatctatctagagtctccccacctggacctccagaccctgggagagccagaccagccccttgacctccaccctcccccacaacctgggccaggttcctctcctccctgtcctcagttataattttttttttttttaatttgaggcagagtttcgctcttgttgcccaggctggaatgcaatggcatgatcttggctcactgcaacctctgcctcctgggttcaagtgattctcctgcctctgcctcctgagtagctgggattacaggcgcctaccactgtgcctggctaattttttggtatttttagtagagacagggtttctctgtgttggtcaggctggtctcgaacttctaacctcaggtgatccgcccgcctccttaaatcttaacctcactgtttaccatgggtgtagcttacttaaactctgtaaaaatgggggtaaggattcgtactgggttgttgagaggataaagcgcaaaagcctcagggactttgcacctatggttttctatgcctagagtgttctttgtctcccttctacacacagcccacccacccactaaaaccataccctccctgagggtagaggtgttatttgttttcttcactgtggtgttcctaggacctagcacagtgcctgatgtataatcagcactcagttaatattggctggatgcaaaatgaataatataaataagctgaataacatgaaataggccgaacgcggtgactcacgcctgtaatcccaacactttgggaggccaaggagggtggatcacctgaggtcaggagttcgagaccagcctggcaaacatggtgaacccccgtctctactaaaaatacaaaattagctgggcatggtggcacgtgcctgtaatcccagctacttgggaggctgaggcaggagaattgcttgaacccgggaggtggaggttgcagtgagccaagatcacgccactgcactccagtctgggcaacaggagcgaaactctgtctcaaaaaaaagttagtttaataacatgagatcactttttaaaccgttaagagctgtactactaataattactctctcagacagtggctctccctcatctcctatatcccgtggattaccctctgttaaaagccaaaattaagcaggcatggtggctcacgcctctaatcttagtattttgggaagctgacatgagccaaggagtttgagaccagcctaggcaacatagtgagaccccatctctacaaaaatactttatattagccaggcatggtggcatgtgcctgaattccagctcctcgggaggctgaggtgggaggattatttgagcccaggatgttgaggctgcagtgagctatgatcacaccactgcgctccagcctggtcaacagagcaagaccctgtctcaaataaataaatgaataaatagggcggaaagcaccaatattgtaattgcctccgtccccaggtgggagctcctcaagggccctccccaggaagtgttcctctggatgacctacctggggcagaggagccagaatatggaggagatggctgtggtggggagagacttagtcctgtgtcttccccacccagtgcagtccctggaagaagaatgcctgctgcacggccagcaccagccaggagctgcacaaggacacctcccgcctgtacaactttaactgggatcactgtggtaagatggaacccacctgcaagcgccactttatccaggacagctgtctctgagtgctcacccaacctggggccctggatccggcaggtatgagtgctgttcccacaaacattaacctcagcagagggcggagcctgccagttgctggcagggagggcttggtccaggaattcgggtctgagggtggtggacgccctgccccctcccacagctctggtccccttcaagggtaaagctgctgagatacgtggctgacaggagtattctgtctcctccccactcaggtcaaccagagctggcgcaaagagcgcattctgaacgtgcccctgtgcaaagaggactgtgagcgctggtgggaggactgtcgcacctcctacacctgcaaaagcaactggcacaaaggctggaattggacctcaggtgaggacctgaggagataagatgaggagtgggagtggggctttggggttgggaggggtgcggtctggcccagaagctaagggtcttacgttctcctccctcagggattaatgagtgtccggccggggccctctgcagcacctttgagtcctacttccccactccagccgccctttgtgaaggcctctggagccactccttcaaggtcagcaactatagtcgagggagcggccgctgcatccagatgtggtttgactcagcccagggcaaccccaatgaggaggtggccaagttctatgctgcggccatgaatgctggggccccgtctcgtgggattattgattcctgatccaagaagggtcctctggggttcttccaacaacctattctaatagacaaatccacatgtgtcttgtgtcttgtaatttcgggacgagtgggttggagggacacattgcttcatcttttccattgacaggccccaaattgggctggaactagcctaatgttcactgggaaggagggtgtgggggttgagctagaatccaggtatctgatccgttagtctgggtctcttacccctgcactggcttccccctcatgccaagctcatcccaccggcactacacatggagaaagacacagacggagtgaagaagggcagagatagccgatgagttattgggcttcaagttgggaagagagtttctttagtgatgtgggctgggtggagatattggtggggaggagggtcttgatgaacacttgccttgtttccatttatttatttatttatttatttatttatttatttatttgcgacaggaatcttgatatattgcccaggctggtcttgaactcctgtgcccagacaatactccctccttggcctcccagagtgctgggattataggcatgagtcactgtacctgacctgctttttaaaaaaaaatgacaactaatgttgcaattaacaatcttttacttagtggaatgttatacttaaattccagaaaggattattgggtcaagagtacatataattttgagagttacaactttatgggggttgtatcaatgtgcctcccccaccagcaaagtatgagagtgcctctttctccactgggtgtgatggctcatgtctgtgatcccagcagtttgggaggctgaggcaggagaatctcttgagcccaggagttcaatatcagcctgggcaacatggtgaaaccccaactctacaaaaaactaaaaaatcagctgggcatggtggtgtgtgcctgtagtcccaactactagggaggctgaggtgagagaatcgcttgactcccagcaggctgcggttacagtaagctatgatcatgccactgcactccagcctgggcaacagggcaagacattgtctcaaaaaaaaaaaaaaaaaaagagagagagagagagtgcctgtttctccacaaccttgtcaacccactatgccattaaactttggttttctgctcatcttacaggtggggaaagggcagctcagtgcagttttcatctgccattgttctgagatctttccatattgacctattgatatgttaaattaccaggtagtaatccattctaggtgtacattacattgaattcagtctcctactgatgggcattggaaggaatggggttcttttatgatcctgacattgctgaaagccacaggccagttatttagtagaatactcctccatttgggtttgtctgtttcctcatgattcattgaggttatgcgttttgggcacaaataccctacatggttatcccgtgcatcataatgggaggcatgtggtgtggggtttgctcattcctggtgacgttaactttgatctttttcttgagattgtgtctgccaggtttctccactacactttcccctttgtaactagcaaatatgttgtagagagagactggagaactagagatactctattcatcagcacacttccacctatatgttctagtagctgatggaccttaaacatgtcttactatgttacagctctttcaccaacccttcaatacttttcagtggtatcaactgtaaaaaccaaacttcttcacaatagcacagaagaccatgcccctcctttgagccctcaagccaaatctctcccacaccaccccataaatgagctccagtcacatttctcatgttgggggtctttgctccagcaactctttctctgcatgcctgaaatgttcttcattaatcctctgcagcctagcactttgtggccacttagatcacaacctacaatccccccctaaaatgacttctgaccactcaaactgacaaacccacccagctgatttctcatcacactactctatgtccttgtgcagatttttatctactgtgtttgttgtcagccttttccctaacaaaacatactctcccgaaagcagggttgtgtctgtgtcattttatgctacatccccagggtctgggtcagtgcctggcaccgagaatgtgctcagtaagttaaggaatcgctgcatccattctgtcagtcaacaattccttctgagcatccagtccactggcccatgctggtctcagccaacagaaagggaattgagttccttgcaaggtctggtggggacagacagttctgagaaccagtgactcttagaacaaggagatgaggctttcacagagggaagcacagagtgtggtattattctgctgaagcccaaagaggtcagggaaggattccaaaggagtaatgtttgccaagcacaaaacagcacagggaatggcattccatggacaggtctcagcaagtgcaaaggcttagaggtaatagaagtgcaagcagaattccagggtggctaagagaggttgtgtggggaatgggcagcagttaaggccaaagaagaaacactggatctgcattccttaggacggtgccctgtgggcccctcacagagcttctctcctgcaactgctaggtataagaaggcaggcttagaatcggactgagatcagtagtttctgcagctgggaagatgagtgaggtgagattgcatgtgtgataggctggcactcagggaagacctcagggttctctcctccccactctgaggcccctctcctgcttcctgaagcccagagtctccacctctgtgagccaaacaccttcctgttatctgcctggtcctagggtagccttcgggttggggttagaaggaatgccaatggttaaccttgtggtattaagcttccagctcaggcagatactctctggactggttcaagctgactgcctgactgtccctccctgctggccctagcacccagactccagataggcacaccacctcacccttcagagcagggctctgagactccacaagtggtgaggacttaccagaggaactgaacttgacctccaacccaaccttccatttgctggtattattctgaagccctcatggcccaggggcctgcctcaggtagcaggtctcactcctgcagtggaggggccataaagttcagttcatgatcagcccccaagccaggggcagcggatgacagggcaggagttccatctagaggagctcctgtgttcaggcgttcctagacacctgcctgcccttctcccatcagcactggggtataaagaaggaaagaggcctgaggtttccagaggcctctacctgctgaggtcttaagaggactcaaccctctgggaaatacaaataaaatcctcaaccctccaaacaactgaatggacacctcttggccaaagagaccccggaaaaactttaaaatccaagtttcctggccgtgatgataggtcactcacacctcagcacacctgcttcctcacgaaccgttaccaggcttctttcccaagagctaaacagaaaccagccctgaaaaccaagaacaggagactccttcactgatttcaatttcaaccaattccgagactcccttccctttcctgattttgacatgacagctgatcagcttacaaaacattcctggctgatcaatgactctcaaccatggaccagttctggctggtttacagaggcagcacacaaagtgctttgggtcctgtgtttcacattttgacatacagagcctaattcaactgcattttaatgtctccaccccgaagtgaatatgggacatatttaacatgttttattggtacacatgtgtgcaactctcatgaatattcataaatcctcttaaaacttattaaatatatatgtttagccaactgatttagtgtaaaacccctgtcccttcaattcctagcttgtaggttgcaacccatcaaaagaaataaagctctcttttccaaatgtaaagatcttatgattttaagccaatataattgaagacaagagtaggatccatggagcagcccaggttcccccagcctaagtgaatgcacaggtgccaggtggagccattgacagctcatttgtctccctgacagctttgggaggaaggtgggtaagctctccccgatctaagatctctcacttttgaattgagatctcgaggacttcatttttttaccctgatcccctccatccggaccctgcaagtgccatctttgttggtcccaggtttctagatggggaggttgggggcagttaagcctgactcatccggcgcatcagcccatcaggtttggtgaggatgcttgccctctagtggcacacgaaggaatgtcttatgcttttctggggaatctagattctaaggagacagtcccagaccagctgccatcaggaacatgcatgtttcagaattatgagaaaaagtcttgtgaatattttggatcctggaaaaaagctaacctggaacaatataaagatttataggccaaaatggagaacttttggcagaatgtctgacatgcctaaattagtttatttgcatgcacaatagggttcaggacctctcagaagcaatgggaggtcttttttttttttttttttttgagacagagtctcactctgtcatggggagtggagtggagtggcacgaacatggctcactgcagcctcgacctcccaggctcaatcatcctcccacctctgcctctcaagtagctgggattataggcatgcaccaccacaccccactaatttctttattttcaatttttaattttttatagaccatgctggtctcaaattcctggactcaaggaatcctcccacgggagaccatttttcagtgttattatgagagctctaaacacagttgggagtctcagataacctccttaaatgagactaattcaaaactgaaggagtctaattcaaaacttgaccagcatattcaaacctatctgccactattggacaggtagctgaagacactgcaaaaagccttatagcccaacaaattgaattccctggctcaagtagtaatagataatttaattgcttcagattttcttttacccaaacaaggaagagtctgtgcagtggcccataacacctgttgcacttacatcaacacttcaggtgaagtagaaactcatatagggttgggcacagtggctcacacctataatcccagcactttgggaggctggggagggaggattgcttgagctcaggagtttgagaccagcctgagcaacatggtgaaaccctatctctacaaaaactgcaaaaattaaccaggcatggtggcacatgcctgtaatcccagctatttgggaggctgaggcaagaggatcacttgggcctgggaggcataggttgcagttagcctagatcacgcaattgcattccaaactgataaagcaagactctgtctcaaaaaaaaaaaaagaagaaaaactcatacagaaagaatttccaaacaagctaaatgattacaagaaataaaactactgatcctatcaatgatctgttcagttggctttctaccaaacagaaattcctttcaagatgctattgaaggctgggcgtggcggctcatgcctgtaatcccaacactctgggaggctgaggcgggtggatcatctgaggtcaggagtttgtgaccagcttggccaacatggtgaaaccccgtctctactgaaaaatacaaaaaattagctgggtgtggtggcgacacctgtaatcccagctacttgggaggctgaggcaggagaatcgcttgaacctgctaggcggagattgcagtgaaccgagatcacgccactgcactccagcctgggtgagagtgagactccatctcaaaaaaaaaaaaaaaaaaaaaaggtgctattgaagtttttgttataattatagtctccatcaaacttttcttcataacatttaaattacttataatatgggacaggcatgggggctcaagcctgtaatcccagcactttgggaggtgggcagatcatttgaggtcaggagttcaagaccagcttggccaacatggcgaaacactgtctttactaaaaatacaaaaattagccgggcatggtggcatgtgcctgtaatcctagctactcgggaggctgaggcaggagaattgcttgaacctgggaggcggaggttgcagtgagccgagatcacaccactgcactccagcctcggcaacagagggatactctatctaaaaagtaaatataaataaataaataacttataatatgtataaccaactgctgtaagtctgctgctaaaaccagaattatgctggctcaatgcatagaacttatagacaagttaaattggtagccctaccttttggcctttatattgcttgatagaccttaggggttgatgagtacctgcccacctctatttctgtctggccaagatgttcaattggctgtaagtctcttggccacaagggtcccaccaagggactggatggatctggagcaggtagcctcagcatcctggcaacgacatggtacaaacaatttggccattgatgctgactgtggcagatcttggctaaaaggaagaaatgtggaataaaaagaaaatccaaagacccctcaactgactgaacaaacccctcttggccaaggagaccccagaaaaactttaaaatctaggtttcctggctatgataagacaggaggctggtcacacctcagtataccctcttccttactgttaccaggcttttttcctaagagttaagcagaatcctgtcctggaaaacagagaatggaagactcctccgctgacttcagcttcaactgcctgatgccatggccagacttcactctctttttgtgatttgacacgacagctgaccagctcacaaagctatccttcctgatcagttcctgttaaccatgggctggttctggctggtttacagaggctgcacacaaagtgcctttgtgtcctatgtttcaccttttgatgtgtatggcctaagtctgcattttaatgttaagtctcagctgggtatggtggctcaatgcctgcaatcctagcactttgggaggccaaggcaagaggattgcttgagcctaggagttcaagaccagcctaggcaacatggtgagaccttgtctctatttttttaattaaaaacaaaatacaaatataaaaataattactgttaactctccaccccaaagtgaacacaggatgtatgtaacatgtatgtttgcttagtatacatgcatgtgactccctttcatgaatattcatagctcctcctataacttattaataagtatactagctaacctatttagcataaaactcctgtcccacctctcctccctcaaagtgcctgctttccatctcagccagaggctccacttcccagcctgcaggttacaacacaatattagtaaaagtgttctttccaagtgtatacatctggtgattttaagttgatacttcccaggttgtccaagattcaggtacagctcactattgcaggatacaagctgggatctcctgggagttggtctctttgcaaatcgtattatctctgtatcaccttttatgaaatcctaaaagaatttaaatctgaaacatgtgactccaaagattttgaataaggaattgtgaacccatggtaaactcctggcttaagggtgtccaattttttggcttccctgggtcacattggaagaataagaaagtttaagaaagtctgtgaatttgttttggggcacattcaaagctgtcctggccacatgaggcctgagggctataggttggacaagcttctagctggctatttctgcattttgtccaaatccatcttttaattattatcattattattattattatttgagacggagtctcgctctgtcacccaggctggagtgcagtggcgcgatctcagctcactgcaagctctccctcccgggttcacgccattctcctgcctcagcctcccgagtagctgggactacaggcgcctgccaccacgcccggctaattattttgtatttttagtagagaaggggtttcaccgtgttagccaggatggtcttggtctcctgacctcgtgatctgcccacctcggcctcccaaagtgctgggattacaggtgtgagccaccgcgtccagctgaaacataatttttctctttttggtttcacatttttactaaagacaaatcatggtaagactgatttgctttattatacttggcctgattatttgtgtaacgtgcagcaagaatacttacttttcacataggctttttaagttggctttgatggaactttgttttgtagaagaatctcagattagactttttcttttaaggccgggctcaggggctcactcctgtaatcccagcactttgggaggctgaggagggaagatcacatcaggagttcaagaccagcctggccaacatggtaaaaccccgtctctactaaaaaacaccaaaaactagccaggcatggtggcaggtgcctgtaatcccagctacttgggaggctgaggcaggagaatcacttgaaccttagaggcaaaggttgcagtgagccaagatcacaccattgcactccagcctgggcgacagagcgagactctgtctcaaaaaaacaaaacaaaacaaaacaaaactttttttttaaagccgagtttggccatgcggttgtaccatcaaatacctatgagttgggtgaattcctcttgagaacccaagatgatttggggctcctgggtctgtcagagagtgacattctttacttgccacaggtcagaaaccctgctcaggatctgtgtagaaaaggtatgaagttagttttcccaaggggctcttatcagctctataagtcaagtttgattccttaaaggaaagcacaccattccagtcaaagccttggtaaaataactggtttctccaattgtgtcctgttacaaaagaaaacagattctggctgggcacagtggtcatgcctgtaatctcagtactttgggaggctgaggtgggcagatcacttgaggtcaggagattgagaccaacctggccaacacggtgaaaccccgtctctactaaaaatacaaaaattagctgcttgtgttgtgtaattgggtaataagagattttaaagaattttttttgtagagcaccatggtttaaagtcagcttaattaaaattagatattcaagctctaacagcctgggactccttggggaaaacaggaggcgccagagacaccattttggaaaaaaaccctgttttcctcttggaaccccaggaattgaaagctgataaattcctctcaaaatttaaggctttgttctgttttggattgcagtatctgaagtttttgacttttggtctatcagaaattatatcgcattatgagagagttttggtgtgtaataactaggtaggaaatatactttaaggaatggctaatggaaattatagatgatcacgtagctctttgcatgtttggattagagaagcatgctcttggccacctggaaggtatggaaataccttttttttttttttttttttttttgagacagagtctcactctgtcaccccggctggagtgcagtggcaaaatctcagctcactgcaatctctgcctcctgggttcaaaggattctcctgcctcagcctcccaagtagctgggattacaggcacctggcaccatgcccagctaatttttgtatttttagtagagacggggtttcaccatgttggccaggctggttttgaactcctgacctcaggtgatctgcctgcctcggcctcccaaagtgctgggattataggtgtgagccaccgtgactggctggaaatatcttcttatctcccactgagagataagacttccacagaagatgggctgattcccccttttttggggagggatccagggtctggtataaaatgggatcttcattttgggggatctgttttgccttccagctgtgcctgcttattagggccaaaggtacttgggagtcccagctatttgggagactcaggcaggagaatcacttgaatccaggagatagaggttacagtgagctgagatcacaccactgcattccagcctgggtgacagagttagactctgcctcaaaaaaaaaaaaaaaaaaaaaaaagaaagaaagaaaaaagagacagattatttagattatttatttacttactttttttttgagatgcagttttgctcttgtcacccaggctggagtgcaatggcacgatctcggctcactgcaacctctgcctcccgggttcaagtgattctcctgcctcagcctcctgagtagctgagattacaggcacacaccaccacacccagctaatttttatttatttatttttagtagagacagggttttgccatgttggccaggctggtcttgaactcctgtcctcaggtgatccacccacctcagcctcccaaagtgttgggattacaggcgtgagccactgcgcccggccaagaaacagattcttattgcacttatgcaaataactatattgctataagttaagaatactcacacctagtttcctaattctggaaaaatcaggtagaaaaaaacaaatatgctccaaatatgttgccagaagtatactttactgaattgtttttttttttttttttgagacggagtctcgctctgtcgcccaggccggactgcggactgcagtggcgcaatctcggctcactgcaagctccgcttcccgggttcacgccattctcctgcctcagcctcccgagtagctgggactacaggcgcccgccaccgctcccggctaattttttgtatttttagtagagacggggtttcaccttgttagccaggatggtctcgatctcctgacctcatgatccacccgcctcggcctcccaaagtgctgggattacaggcgtgagccaccgcgcccggcctactgaattgttaaaaggtgtaaatagctcaaaatttttcctgactctgaaaacaaaacaaagtttcagcagcattttaagcaaagtcaaaaacatttcttcagtcttctatttgttcattccatgcagttaactcctgtcctgtttaatcgtcatgaacatttcagctgtccatgagtcctgaaagtttttcctctattctgacgtcacaatctccaaacttatcagaaacctgcattcaagagaacctgtcaaaatcctatagttgattataaaccaccttttgaagaggatcaaaataagaaaacaattgtctgtggttgacagaagtcttaggacagccactatttaagccacaattgaaaaggaaatgtgggggtgggcacggtggctcacgcctgtaatcccagcactttgggaggccgaggcaggcagatcacctgaggtcagggatttgataccaacctggccaacatggtgaaaatccgtctctactaaaaatacaaaaattagctggggatggtggtgggtgcctgcaatcccagctactgagagtctgaggcaggagaatcgcttgaacctgggaggtggagttttcagtgagctgaaattgtgccactgtactacagcctgggtgacagagtgagactctgtctcaaaaaataaaaaagaaaagaaaaggaaattttggttagttctgtgacaacaattttacataacaattatgactattaataacatacactaagttatcaaggaattatgggtgttttccataattttggaacatgtccaataacatatttatgcaaatataggccaaagaaagccaaatactatttcacatttgacgatgcttcctttatggattttatactgaataagccaaatttcacctttacgttagtgtactattaatgttaaacccaattctttaataaaaccttttagacaaatttatttaatcttaatcagtttgaccataaagtaagattcttataaacttttgtttcctcacctccccagaaaagtggatcctaaaccttttataaccctttacaatttttgtgaacgagcagattaatgctctaagaaaaacctgttgtgcttttattccaatgtttgatttatagaaaaaatgaatacccctttaactttagccaacatgttcacacagaatttcttttatgacattaatttttcacaaacctcccacaatttgttcaagccttcagctttatctcatctaaaacaatcctttaaccctttaatctaggcagaaaaatccacattcccatgacttcttataatcttttaccaaaaacacatttcactttccttacacaccttgcatgtaaaactgatgttatttcccaaagattactaaaggcatataaactaaaaggcatcacagtttttatttttctaataaaatatttgatttaagctcttattattttttaacctattaatcaaagctcttttatatctcacacacacaacatatataaatacacagaccagaagatccagtagttgtaagaattttcatttgccagtttctttttctttctttttttttgaatcggagtcttgctctgtcgcccaggctggagtgaggtggcttgatctcggctcactgcaagctccgcctcccaggttcacgccattctcctggctcagcctcctgagcagctgggactacaggcttctgccaccacgcctggctaagtttttgtacttttagtggagacggggtttcactgtgttagccaggatggtctcgatctcctgacttcgttatccacctgcctcggcctcccaaaatgctgggattacaggtgtgagccaccgcgcccggccatcatttgccagtttcttaattggattactgactttagggtggagcccttgggggaacaaggtcaggaaagcatgcagtttctacagcctaataagcaggcaagctggaaggcaagacagatcccccaaaataagggtcccattttataccagatcctggatcccccccaccaaaaaaggggaaatcagcccatcttccgtggaagtcttatctctcagtgggagataagcgggtatttccataccttcgaagtggccaagagcatgcttctctaatctaaatatgcaaagagttaagtattcaccaataacttccactggccattccttaaagtatatttcctacctagttactacacaccaaagctctgtcataatacgatgtaatttctgataccaccaaaagtcaaaaacatcagatactgcaatgcaaaacagaacagagccttacattttgagaggaatttgtcaactttcaactcctggggtttcaagaggaaaacagagtggtattttttttttttttccaaaatggtgtctctggcacctcctgtttttcccagggagtcataggctgttagagtttgaatatcctgctttaatgaagctgacttttaaccatagcactcttaaaaataaaaatcctttaatgtctcttattacccaacttcagccatgccaaactaccaatatttctggcttctgaactttaccaaaggcaaactcccaggtactcggagaaaaaaaattcaagacagtttgtggagggaaagagaatctacaaatgttcagacagatctcaaactagaaaggactcattccctaagctggggattgaaccctgaacctgggctgccactgtgaaaagacagtcttagctgctgagctacagcattgggcagtctccattgcccttcccagaaggaggctagagtcaccaattttgagcttgcaaaggcttttatctgatcaagataatttttaggagtaactatggcatgaaccccaaaactcctgtctgctggatggtagaaacgaagagaaagtatcgccacgtggttacaaggtgaagctcccaaggacataaaacaagacgaaagagaaatttcatccagcttttcagggaccttcagcaaagtttataactgatcagtttgcttggccattttgaacagcgggcttacaggcgtcatagtgagagacaggactagctggatatcctaggcctactaagaatccctaagcctagctgggaaggtgactgcatccacctttaaacacggggcttgcaacttagctcacacccgaccaatcaggtagtaaagagagctcactaaaacgctaattaggcaaaaacaggaggtaaagaaatagccaatcatctatcgcctgagagcacactgggagggacaatgataggatataaacccaggcattcaaaccagcaagggctaccctctttgagtcccctccctttgtatgggagctctgttttcactctattaaatcttgcaactgcacactcttctggtcagtgtttgttacgactcgagctgagctttcacttgccgtccaccactgctgtttgccgccatcgcagacccgccgctgacttccacccctccagatctggcagggtgtctgctgtgctcctgatccagtgaggcacccattgccgctctggattgggctaaagtcttgtcattgttcctgcacggctaagtgcccgggttcattctaatcgagctgaacattagtcgctgggttccacagttctcttctgtgacccacggcttctaatagagctataacagtcactgcatggcccaagattccattccttggaatctgtgaggccaagaaccccaggtcagagaacaagaggcttgccgccatcttggaagcggcctgccactatcttgggaactctgggagcaaggaccccctggtaacagtaggcttgcattctatcctaaggtacccttctttatggcagaacaatatagacacacaaagcacaccagattcgttacagcttaaggctagcctcacaagtcttttttctcattaaccaaaacttgcctgtggtaaggtggggaaagtgaagagctcaggaagaccagagaaagactcacctatcccagtgacactgaatcaaaagttcaggcagccgctcattggttaagaagggatcttttccaggagttgcatcagctcttaagtgtccccgtttggggagcaaaaagctctcatgtcccaggatcctgtacatacacaattctgtcacccacagccatcagcaaagatttcaaggtagattaatccaaagagaatagcaattaatatcccatggtgctaaatccgttcttagccaagaggaactttactctgagaggggcttctaactccctaaatcttagaagggactctaacactcctgagttgggcctcaaaccaaagttcagtcaagtgtccttgccttttattaagaggggcctttaacccactctgtcttaggagagactttaactcccctaagttgagcctctaacccaattccatcctttacctgggtaccccgccacttaccctagatagccaattggtgctgcagtctatttcctttgggtagggtgtctcctcagggttcgacaggaagatgttaccagaaagggatccagatccagaccccaagagaaggttcttggatcttgtataagaaagaatttggggtgagtccatagagtaaagtgaaagcaagcttattaaggaggtaaaggaatacagaatggctactccataggcagggcagtggcttgagctgctccactaaggatacttattgttacttcttgattatatgctaaagaaggggtggattattaatgagttttccaaggaaggggtggccaattcccgtaactgagggttcctctcctttttagaccatttagggtaacttcctgatgttgccatggcatctgtaatcacggcactggtgggagtgtcttttagcatgctaatacattataattagcatataatgagtgatgaggatgaccagaggtcactttggtcgccatcttggttttggtgggtttgggctggcttctttaccacaggctgttttatcagcaaggtctttgtgacctgttatcttgtgctcacctcctagctcatcctgtcacttggaatgccacacctcctgggaatgcagcccagtaggcttcagcttcattttacccagcccctattcaagatggggttgctttggttgaaacgcctctgacagacccaccagaggagcccttcagtttgtattaatatgatatgtgactacttatttcacagacactgtgtgtcaaatgtcggtacaatgccaacaactcactttcttggttgttgagtttccgcattacacaaataaggaagcaggcccagaggagagcctgggaaatgaagttggagagacccatcctggggttgcttgatttagggatttagactgggaatgactcctccatagatctgaaagaagaaactgcacactgttcatagtggcttcttttctgccagccctaaacagctcaagaaaggagagtctctcagttatgaggctgggtgtgaagcattttttttttctttgagagaggtcttgttatgttgcccaggctggtctccaaatcctgggctcaagcgatccttccaccttggcctcccaaagtgctgggattacaaatgtgagccaccacatccggcctgaagcatcttggttcatgcatctagcaaaccttcagtctgtgtctctcaatcccactggacatgaggtctgcctataacaattatttggctacaacccctttaatatcctgaacttagctaaacagttattttaaaaatccatattcaaatataactaaagaagaaacagaggaaaagtaatttgtaatatggatttctatttatattcgttttgactccattagcagatagcagtcactgccctgtttgcacttgttttgaatcagtgagcctgtagctgccaagtgcagactaacaagaggtaaataacctgtataccttgagcagctctgactttaacttattcttttattttttatatttttatttttttttatttttatctctttttagacatgaggtctcactatgttgtcccagttgacctcaaactcctgcactcaagtgatcctcccaccttggcctccaaagtactgggattataggtgtaaaccactgtgcctgggcttttatatattttttaagtgcacattttaatgtttagcttgtcagccttaagtaacgagatccagaaagcttgaggatagctacacagaagcatagattcaagttgtcctgaatatacacttcgattcacagcagttacaagtgagtttttaaggaaacagaatagttcctaagttgtttatcaagaatttaaaataaaataacataagcaattcattggctatacattgttttttgtatcacaaattccaggaacagataacgggtgaggcagctagtcagggacaaaacgccttggaacaattgtctctgggcatgggtggggagggtgtgactgaagttccatactcatgcctttctgggcctgataaattgggcatgtctcacatcatgagactgctctgagctatttttcttttctcaagctttataccaaattctaggccgtgggctttcattcattcaataagtatgtattgagtgtttatgtaatcggaactcttctggggttacaatttaacttactttctcacctccgaatggttatcacctcaacgaggactaaatccaatgatttttttttatcttgccaaaattcctatctaaggggtctggggagtcatgccctacaaatcataaattctcatcagatgggttttatttaaccctatatatcatgacttactttccaacctgactctggcataacatgacgagacaaggaagaaaagcaaaatattttaatatttttacctcaaaacatgtttctttgccatatcttgaaatggccctgctactgtcctttgtgggggaaaattttcatctgtaaagaatctctattaacatagctggatctttttctaccaggcccttccaatcataaagagattaactaagtgtagcaccttttatagatctgaataggaaacacttgtcatctgttgtttctaagggcagccactataagacttcaaaagaaccttggtctccacagtcttttatcttaacatttcttttctatcaaccccaggtctttagacaaactcaaccaattgtcaaccataaaatgtttaaatttacgtatagcctgaaagccctgccaccccactttgaattgtcccaccttcctggaccaaaccaatgatttttttttttttttttagatggagtctccctctgccgcccgtgctggagtgcagtggtgtgatctcggctcgctgcaacctccgcctcctgggttgaagcaattctcctacctcagcctcctgagtagctaggattacaggtgcctgtcaccacgtccagctaattttttgtatttttagtagagacagggtttcactatgttggccaggctggtctcaaactcctgacctcaagatcagcctgccttggcctcccaaagtgctgggattacaggcgtgagccaccgtgcctggccaatgtattccttaaatgcatttgattgatgtctcatgcttccctaaaatgtatgagacatccttctcccctgattgttttcaaaagcagtgatccattgaggtgctcatttttgtaaccccagttactagaaaagtgcctgggtaagagtatgtaggatctctataaaagctgaattaacgaattttgtaatgactgcacctccagacaggagctgtcttccgggcttccacagtctctgacagccctctcccacaaagagtttaccaacagcaaggactttcctggatgacttccactgggttggggattaaggattgaaaggggagaggctgggtgtggaatattctggctgtgctggctgtggacttagtcctgtgtcttcccgcatccagtgtagtctctggagaaagaatgcctgagctttaccagcaccacccaggaagcccataagaatattcccatctatatggattcaactggaaccactgtggagagatggtacctgcctgcaaacggcactttatccaggacacctgcctttacgagtgaccccccaacttggggccctggatccagcaggtacgcatggcttcctggcatccaagagctagcagaggagctgaattttccaggcgtctctgcaggcagcaaccccagctccagttctattcagggctgggttcctgggattcttgagcctgagcccttcttttctaccaaaatctcccaggtggatcagagctggcgcaaagagtgggtgctgaatgtgcccctgtgcaaagaggactgtgagcaatggtgggaagattgtcgcacctcctacacctgcaagagcaatgggcacaagggctggaactggacctcaggtgagggctggggtgggcaggaaaggagggatttggaagtgaaggtgtgtgggtgtggaacaggtgtgtgacattttggggttgtagggctggcagaatcagagaccctttggggcccagtggctaaaggtcttccctcttccctacagggtctaacaagtgccaggtggcagctgcctgactacctttccatctctactttctcacacccactgctctgtgcagtgaaatctggactcactcctacagggtcagcaactacaaccgagggagcagccgctgcatccagatgtggttcgacctggcccagggcaaccccaatgaggaggtggcaaggttctatgctgcagctctgagtggggctgggccctgggcagcctggcctctcctgctcaacctggccctaatgctgctgtggctgctcagctgacctccttttaccttctgatacttggacatccctgccctgtttagccccacagctcccaactatttggttcctcttctatggtcttgtctctgacagccactttgaataaaccagacaccacacatgtatcttgagaattatttgggtatgaatgggaatgtggctgttttgtttcccatttcttattgattgaagccagttagactgggctagttcccagctctgatgcttgctatgaactagcctgatacttaagtattcttctaaggtaggagacatttgtagctctcgattttattattcactatagctccaatttagagccaagcccaggcatttttctttttttgagacagggtctcactctctcacccaggttggaatggagtggcatgatctcagctcactgcaacgtctgcctcgtgggctcaagtgatcctcccacctcagcatcccaaatacttgggactacaagcatgtgccaccacacctggctaatttttcaattttttgtagagaggaaatcttgcaatgttgtccaggctggtctcaaactactgggctcaagcaatcctcctacctcagcctcctgagtagctgggtctacaggtgtgagcctccacattcagctaatacatataatataaaacatgtattatatatgtaatagtagagacagggtctcactattttacccaggttgttctcaaactcctgcgctggagtgatcctcccaaaatgctgggattacaggcatgagtcactgcatctggccacaagtcatgtttatttcttgctcaagctacaatgctgaatgtgggttatcagggggattctgtttatttctcattcctggactacattagcagccagggggttctgcttctcactcaagaacccacgctgatggaggctccatcttccatgagacaggaagagggaacttggcaaattccataaggctcttcaaatttccacccatcacttatttcattggccaaatcaagtcatgagcatgcctaaattcaagaaagccaggaaaacataatcctatcatgtacttgcaaggagaggggaatcacaaggtttgcaacagacctaatcatgagtaaaaagacttcattattttctcgtagatttctgtttctggcatggtcatagttacaaatttaattttttggttagatcctagtaagaaggaggaccaactctctatacatatgcaaataactacatcaacctgaaaagtggagcaatccactgatgaccgccctggctagtcttgtaaacaaggccaattgatgccttttcgcccttcatttatttctatttattatttttattttttgagacagggtctctttctgttgctcaggctggagtgcagtggcacagtcatggctcactgcagtcttgacctcctgagctcaattgatccctcaactttagcctcccaagtagctgggactacaggcacatgccaccatgctgggcaaatgttttgtattttttttgtagagatggggttttgccatgttgcccaagctggtcttgaactgctgcgcccaagtgattcattcacccaccttgacctcctaaagtgctgggattagaggcgtgagacacctctgccagcccactgatttcttttttgaaccgaaagcatagttgatcaatgcaaaagctaataattggatattaacaaaattcaaaactcttgcactttaaaagacacccttaagaaaattaaaaaacaagcaacagactggaaggaaatatttgcaaacacatctgataaaggatctgtatccataaaatacaaagaacacttacaactcagtaacaagaaggcagacaacccaatcaaataatgggcaaaagaaatgaacaaatatgtcattaaagaaggtacacaaattatgaatagttacacgaaaagatgctcaacattattaatcattagaaaaatggaaactaaaaccatagtgatagacggttttatacctactagaatggcaataataataatgataggcaataacaagcattggcaaggatgtggagaaatgggaaccctcacacagtgctggtggggatgtaaaatggtacagcccttcggaaaacagtgtggcagtttctcaaaaagttaaatgtaaaactgccatacaacccaaaattccactcccaggtgtctactcaggagaaacgaaaacaaacataacaaaacttaaatatgaatattaataataatcatatttatgtatgtaaatatgatgtatcatttatgtatgtaaatatgatatatcatattatgtatcattatatataatagccccaagctggcaataacctaaatttttagcagctggtgagtagatagacaaaatgtggtgaatccatacaatagaagactgtgcagcaatgaaacgtgatgacacatgctatgtcgtggatgagcgtcaaaaacattatgttaagtgaaagaagccagacctaagaggcttcatgtggcatgatttcacttacatgaaatgtgcagggaaggcaaatttatagaggcagaaagtagattagtagttgcctggggctggaagtgacaacagggattaattgtaaatgggcatgaggggggataagaattgaggggatgattctgagtttctgtggggtgtatccatgagggaaagtattctaaggaaattggcatgtggctccataaaaatctatcatctgagacaaactccattcccatcatgaactttaaaatattggttggaagccaagcatggtggctcatacctgtaattccagcactttgggaggccaaggcaggtagatcacttgagccagggattctagaacagcttgggcaacatggtgaaaccccgtctctacataaaaatacaaaaaatttagcccagtgtggtggtccacgcctgtagtcctagctatgcaggaagctgagatgggaggatctctttagctcaggaggtagaggctgcagtgggctatgactgtgccactgcagtccagcctgggttgatagagtgagaccctgtctcaaaaaaaaaaaaaaaaaaaaataggaattgctggatggtaatgttgtaggagtttctcctcagttcagccaaagacagggtccttgtcacctggccatgaaatattaggcttgcagacactttgaagggtgagaaaaatggaatttattgggcaaaaaaaaaaagcggggaaacggggaccctcggcagagtgagagtcctgctagtacacgcttcccacctctcaggttgaatcccaggttccaccctggaagaggaggggccaggctcctcagcacgaacttccagaggctccaccccagtgcacattcctcccagtgtgcgggtttgtcagaggttctctggggacccctttacacttggctgtctcattcccccctctcaagaagtacatcaaactactgttagaacaaggataggggtgaggacgaagaccgatctaaactgcttcctgctaacagggagcggtgttttgggaaacggcagtcagagctccctcagaagcctatctaagggttcccggcagaaggcgccatcttccgaggctccggttgcacgaccatttggagtttgatggcctgaaggcaagaggagaaaaaccaggttattagaaaacatgtgttaaaacgaaacaagggagggtaaggacagcttaaaatccctaggccttttaccagtttgcacagggagagggaaaccaaaagcccgactggtaaaaaaaactttacccttttgccagcatgtcatgcttgtgggttcccttcctctgagcccaatcctaagccaaccagctgaaggtttgggaaattaactctttccagtttggaggatgcatctgaggggagtgtcctatagtacaaagacacaattacctattagtgaagagaagacagtggagaagaaaggaaaaaaaggtgctttttaaaggagtcccaggggttcagcatgcattcaaaaggggtacagagtgaagatgaatggctacccatctagaaagaggggagcaggcatccctgtctcctatctctttctagcagataccaggggtacatgagggagagaaggaagagcgtcctctttccctcttctgtccttgcatacccaagtcctggtgaccttggcaggtgctgccatgggtgccacagcagcttgcacccatgaagcagggagtacctagagaataggaattatcagccagactcagtggctcacgcctgtacaacccagcaccttgggaggccgaggtgggcagatcatgatttcaggagtttgagaccagcctggccaacatggtgaaaccccgtctctactaaaaatacaaaacttagctgggtgtggtggtgcatgcctgtagtcccagctactcgggaggctgaggcaggagaatcacttggtcccaggaggcaaaggttgcagtgagccaagatcacaccactgcactccagcctgggcaacagagtaagactccatctcggggaaaaaaaaagagagaataggaattatccgctcttacctatgtttctataccccctacagtcagtagtcttggagtttcctagacctcatttatgctgtggggaaaagcaagagagatcagattgttactctgtctgtgtagaaagaagtagacataggagactccattttgttatgtactaagaaaaattcttctgccttgagattctgttaatctataaccttacccccaaccctgtgctctctgaaacatgtgctgtgtcaactcagagttgaatggattaagggcggtgcaagatgtgctttgttaaacagatgcttgagggcagcatgctccttaagagtcatcaccactccctaatctcaagtacccagggacacaaaaactgcggaaggccgcagggacctctgcctaggaaaaccagatattgtccaaggtttctccccatgtgatagtctgaaatatggcctcgtgggaagggaaagacctgaccgtcccccagcccgacacccgtaaagggtctgtgctgaggaggattagtaaaagaggaaggaatgcctcttgcagttgagacaagaggaaggcatctgtctcctgcctgtccctgggcaatggaatgtctcggtataaaacccgattgtatgctccatctactgagatagggaaaaaccgccttagggctggaggtgggacctgcgggcagcaatactgctttgtaaagcattgagatgtttatgtgtatgcatatctaaaagcacagcacttaatcctttacattgtctatgatgcaaagacctttgttcacgtgtttgtctgctgaccctctccccacaattgtcttgtgaccctgacacatccccctctttgagaaacacccacagatgatcaataaatactaagggaactcagaggctggcgggatcctccatatgctgaacgctggttcccagggtccccttatttctttctctatactttgtctctgtgtctttttcttttccaaatctctcgtcccaccttacgagaaacacccacaggtgtgtaggggcaacccacccctacatatgccatggatactagcatgacctttatccatgaaatgggaggcttggcttgattggcaggaattagccatgctcacttgcacgcactgtgccttttttttttttttttttttttttttttttgagacagagtctcgctctgttgccaggctgaagtgcagtggagtgaactcggctcactgcaacctccgactccctggttcaagtgattctcctgcctcagcctcctgagtagctgggattacaggcacgcaccaccatgcccagctaatttttgtattttttttttcgagatggagtcttgctctgtcgcccagtctggagtgcagtggcatgatctcagctcactgcaacctccacctcccagttcaagcgattctcctgcctctacctcccaagtagctaggattacaggtgcatgccaccatgcctggctaatttttgtatatttagtagagacggggtttcaccgtgtttgccaggatggtcccgatctcctgacctcatgatctgcccgccttggcctcccaaagtgctgggattacaggtgtgagccactgtgcccggccttgcactgtgccttttaacccctgttatcatctgcctctgaatcccttagatccagttttctttcctggggctttgactcaaagcttggaatagaatttgaaacaaaaatatgtgtctaggaagggctgcatggactccttatcataagccaaatgctaaggaaggtgaagctgcagaattgagtcctcctccaacaagggagagaaaaagatgtcttgtgacatgcccagataattggtggctatagttatgtaagctaggatttgggtgcatggtgcttggctttggttagctcttactttccaaaaaaggaaacctccgattaatgggcatcctatttattcccatcacctggcaggatttgcaggataattgctcagaactaaaatattgatccagatttttacattacccatcctctccttctttctgagctgcagctggagattgctggttggttcacaggaacaaggagtgttagcctaaaaatgtaggcaaaaacttaaacactaatgactttagaatttattgacaaatgtatggtgttttgaaacataatttctctctctccagtcctcatttttgttaaaaaagcaaattatggtaggattgagttgtttgcaaaatagactttagtcatatacttggcctgattatttgcataaagtgcagcaagaataactatttctacataagtcttttagattggctttgatggaactctgttcttcaaggaatttcagacaaaacgttttaaaactgagcccagccatggatttgtatcctcaaatacctgtaagttggatgatcttctcgtgttaaggtcccatgacaaatttggagctcctagacctgttagaaagtgacattcttggccaggcgtggtggctcacacctgtaatcctagcaccttgggaggccgaggtgggcggatcaccggaggtcaggagttcgagaccagcctggccaacatggtgaaaccctgtctctacttaaaatacaaaaaattagctgggtgtggtggcaagtgcctgtagtcccagctatttgggaaactgaggcaggagaatcacttgaacctgggaggcggaggttgcagtgagccgagatcatgccactgcactccagcttggcgacagagcaagagtctgcctcaaaaaaaaaaaaaaaagaatactcacggataatttccaaattctggagaagccaggcagagagagagaaaaatatgcttcaaattttgttcacaggagtgtagcttactctagtattaaaggccttaaagagttcaaaataattttccttgactctgagaaacaaaacaaggatcagcaatattccaagcaaaagtcaaaaaggttgcttcagctttctgagttcagtccattcagttcttgttatgcttgatattcgtgaacattttagctcttcatgagtcctgtacattttcctttattccaatatcacagtctccaaagttatcagaaacctgtatttgagagcacctgtcagagtcctatagcttattacaaaccaactttatttttttttgagacaggatcttgctctgttgcccaagctggaatgcagtggtgagatcttggctcactgcaacctccacctcctggattcaagcgattctcctgccccaacatcctgagtagctgggattacaggtatgtgccaccatgcccggctaatttttgtatttttttttttttagtagagatggggttttaccatgttgaccaggttggttttgaactcctgacctcaggtgatacccctgacttggccttccaaagtgctgggattaaaggtgtgagccactgcacccagccggatcaggcacttttaacttgaaaacatgaagttctctttcctaacttttttctttctttcttttttttttttttttccgagacaggatctcactctgtcacccaggctggagtgcagggatgccatcacagctcactgcagccctgacctcctgggctcaagcaatcctcccagctcatcctcccaaatggctgggactataggcttagaccaccatacccaactaatttttgtatttttgtgtgaagatgaggtctccctatgtttcccaggctggtcttgatctcctgggctcaagcaatccatcagccttggcctcccaaagcactgggattataggcatgagccaccaaggacggccccctaatgttttttatattggctaatgagctttaagtttatacatacaaggcataaagaaataactttaaagttatgttattagatgtacagtgatatgatttagctctgtgtccccacccaagtctcatcttgtagctcccataactcccatgtgttgtgaaagggacctggtgggagatgattgaatcgtggaggtgggtctttcccgtgctgttctcatgataatgaatgggtctcacaagatctgatggttttaaaaacgggagtttctctgcacaagctctctctttgcctggtgccatccacataagatgtgacttgcttctccttgccttccaccatgattgtaaggtctccccagccatgtggaactgtaaatccaataaacctctttcgtaaattgcccagtcttgcatatgtctttatcagcagcgtgaaaacagatgaatacagtaaatttgtactgggagtggggcattgctgaaaagatacccaaaaatgtggaagcgactttggaactggggaacaggcagaggttggaacagtttggagcgctcagatgaagacaggaaaatgtgggaaagtctggagcttcctagagacttgttgaagggccttgaccaaaagcctgatagtgatatggacaataaggtccaggctgaggtggtctcagatgaagatgaggaacttgttgggaactggagcaaaggtaactcttgtatgttttagcaaagagactggcagcattttgtccctgccctagagatttgcagaactttgaactcgagagagatggtttaggctatctggtggaagaaatttgtttattattattattattattattattattattattattttgagatagagtctcactctgtcacccaggccagaggacagtagcgtgaccttggctcactgcaaccttcgcctcctgagttcaagcgtttctcatgtctcggcctcccaagcagctgagataacaggcatgtgcctccatgcctggctaatttttgtattttagaagagacagggattcaccacattggccaggctggtctcaaactcctgacctcaaatgatccaactcagcctcctgaagtgttggaattacaggcatgagccaccacacctggctgcggaagaaatttctaagctgcaaagcattcaagaggtgacttgggtgtggttaaaggaattcagttttataagggaagcagagaataaaggttcagaaaatttgcagcctgacaatgcgatagaaaagaaaagccaattttctgaggagaaattcaagccagctgcagaaatgtgcataagtaacaagaggaacattaacccccaatacaatggggaaaatgtctccagggcatgtcagaggtcttcttggcagcccctcccatcacaggcccagaggcctaggagaaatggttccgtgggccaggtccagggtccccgtgctgtatgtagcctagggacttggtgccttgtgtcccagctgctccagccatggctgaaaggggccaacatagagcttaggccatggctgcagagggtgaaagccccagtccttggcagcttccacgtggtattgagcttgcaagtgcacagaagtcaagaattggggtttgggaacctccacctagatttcagaagatgtatggaaatgcctggatgcccaggcagaagtttgctgcaggggtggggtgctcatggagaacctctgctagggcagggcggaagggaaatgtggggttggagctcccacacagagtccttactggggcactgcctagggcagctgtgagaagagggccattgtcctctagccccaagaatggtagatccactgacagcttgcactgtttgcctggaaaagctgcagacactcaatgccagcctgtgaaagcagccgggagggaggctgtacactgaaaagccacaggggcggagctgccagagaccatgggaacccacctcttacattagtgtgacctgatatgagagatggagtcaaaggagatcattttggagctttaagatttgactgccctgctggattttggacttgcaggggcctgtagcccctctgttttggctaatttctcccattttggagtggctgtatttacccaatacctgtactcccattgtatccaggaagtaactaacttgcttttgattttacaggctgataggcagaagtgtcttgctttttctttgctgagactttggactgtggacttttgagttaattctgaaatgagttgagactttgggggactgttgggaaggcatgattggttttgaaatgtgaagatatgagatttgggaggggacagggatggaatgatatggcttggctgtgtccccacccaaatctcatcttgtagctcccataattcactcatgttgtgggagggacctggtgggagatgattgaatcatgggggtgggtctttcccatgttcttgtgagagtgaatgggtctcacgagatctgatggtttttaaaacaggagtttctctgcacaagctctctctttgcctgctgtcatccacataagatgtgacttgctcctccttgccttctgccattattgtgaggtctccccagccatgtggaactgtaagtccaatgaacctctttcttttgtaaattgctctatctcgggtatgtctttatcattcctgaaaatggactaatacatacggcaatactcaagagagcaagtgtggatagcttgggttcatgaggtttttggtttttgtcaaaagcataaatgtatactgaaactacccagaaaaagcaaagtataaaacagtatgctaccatttgtgcccataaatgggatatgtgtagtgtaaatgcatagaatttgaccagatgtatacccagagaccagaacactcagtggcctcatgttcatactttggcaaacacatgtatagtatccttaacttaaatgtaccattgttgtgtgcattctagtgttattgacatttacatatctattatcaagtcagataaatcattctgtgtctttgtattttcacttcctattttgtatatttatgtatacatacacacataccaatacatatttaaataaggtataacttcacctggtccaaaaatcaaaacaacgtagaaaggtttacagtgaaaggtcgcatccctgatgctgtcctcttcccccaggtgatcaccttattggtttcttttcatacctttcagcattttctcctgcaagcacagatattctaactcctccttttttacacagaatttttttttacatagcattcttctgcaccttccttctcccacttcacaatgcacatggagatttttccgtatttgtacatcaggagcttcctctttctttgttaccacattaaattccactgggtagatgtaccataatttaactgggtccttattgaaagacaattgagctgtctcctagacaaagccttgtgcaccttcccgaacagagggtctaaccaagcaggcaggatggggttataaagtaggtggggaggtgggagagactccaccctcccaggtgggctgaggatggaggtaaggccctgcaacaggacagagggaaaagtggggatgagacatgggaggcgagatagcgctcactgttctcgctcagccccctcctccatttgccgctgacctgttggcctcccccaacctctgagcctgcctctgcctaggtaatttcccaagacccaggaggggtgaagggtgaggtgcgattgcccccacctccttgcctcccgcagcatctgctccaggaccatgaacaatagctgacagctccatggcccttgctgtccccatctcagcttccctgggcatctaaacctcagttgccrtggggtaggaggacaggctgaggaagcagaagcctgaggctgtctagagtctcactcctgcatcagcaggccaccacctgtggttcctccttgtgcaaatttgagaggaattgcataaaacactggagaaatccaagaggggaagtccacaagggcggtggctccctccatgatctcagagcaagctggtgtcagaacctggacctagagcactgttgggtgggaagtaggaggagagtcctgcctccaggccagccggggaagggctccctctcacctctacacgcagcgcatttcttggctcagctgccctgtaggggatgcagggtggggacagcagagatctgggcctgggagggagacagtacacaatcacatggctgttgcccctccctcaggccttgtctacctctgactgtggctctctggcaggaatagatggacatggcctggcagatgatgcagctgctccttctggctttggtgactgctgcggggagtgcccagcccaggagtgcgcgggccaggacagacctgctcaatgtctgcatgaacgccaagtaccacaagacacagcccagccccgaggacgagctgtatggccaggtgaggataaagtcgggtctggggcaggggagagagctgcctttgacagagaaaagttagcagggtgaagtcagctgtggaaggtgatgaaggcagaggatgactgctgtgatcctggagggcctcccctgggaggacaccaaatctacaataataaaggaaccacatacctaacacccactatgagcctatgagccttgtgctttcactcatgccatgttagtgaatatgcccaaagggcagggtgggtgcgtggtagtctctacttacgcaaatgaggaaataggcccagagagggcgcaggtgcaagtgggaaatgaggagagggactgtccatacctttcccagccttaattgtgtgccagcccacagagctcaatggcacagtagaagaggagctgggcccatcatggtcatggtgcagcctacatgtacaaacagtccaggtttccacccccattaggtactgaagagacaacgaccaatccaatatgctggggagacttcccaggcaagagaccattggccttgacctgggaagatgagtaagagttttctaggaggaaaaagcgggaaagggcagcctggtagaggacagcatgcacacaggtcagagggtgatggcacgagcaatggcgggtccagtgtggccagagccagcggtgccactgcccacaaggaaggggaggggaggccagggccctcatgccacaggtaaggccactgaggcagctcggggagtatgagctccaatttgaattccaagctcaggagagtgcctgtatttcatttctctggtctcctggcctgctccctagaagggttcacattcccagagggtgaggatgtgcccagggagagactgtggcatggacaggctccgagggctaaagcaaagagaggacagcctggaagccctgtgacatctgagtcattcccaacattccatttgcttattttaaaatcagggtaaaatttaaaataaataaataaaataagttctccattttagccatttttaactgtacaggtcagtggcattaagtatgctcatgtatgccgggtgcagtggctcacgcctgtaatcccagcactttgggaggccgaggtgggcggatcacctgaggtcaggagtttgagaccagcctgaccaacatggagaaaccctgtctctactaaaaatacaaaaaaaaaaaaaattagccgggcatggtggcccatgcctgtaatcccagctactcgggaggctgagacgggagaattgcttgaacctgggaggcagaggttgcagtgagccgagatcgcgccattgcactccagcctgggcaacaagagcaaaactctgtcaaaaaaaaaaaaaaagtatgctcatgtggttgtgcaaccatcaccaccatccatctcctgacctctttcattctccaaaactgaaatggaaactttgtgcccaccacttcatttgcttttcagaaccttctaaagcacctactctttgccaagaaatggtgcagatgtagactttgagagatacagatgattatcattctcagggccatgagctatatgagagtgatgatatttgttgggccacttctatagccagggagtacttttcattatattcagtaactctttcagaggcagaaacccctgaccctgactggcaaaacccatgtctgccaaaccccaagacccatgatgtgcaaggggtcttgcaggaagaccaagagttgggacagccaaggaaaagcaagtgtgaagttgtgctggcggggaagcatgttctgtgtcggccggcactgggcgtggtggcccagtgggtaggtctggctccactcccatggatttccctattgtttctcctggttgctcagacctgtcacgcctctgccatcacttgaccctaggtgcaagggttcagcccagaaatkttatgcaattgactcatgatttctcaggttttctgcatcctggcctagagtgatttccaaagaaaaacctccaccatttctgcttgtcttgcctgcattgtatttacctttctaggattgccttttccacatttagtcaagcccgggttcaggcccacgttcaggctacagctcctctgttcccccaccactctcaggatc

SEQ ID NO: 5 - DNA, 86950 bp, Homo sapiens
  misc_feature (20282)..(20282): n is a, c, g, or t
  misc_feature (39985)..(39985): n is a, c, g, or t
  misc_feature (39989)..(39989): n is a, c, g, or t
  misc_feature (51996)..(51996): n is a, c, g, or t
  misc_feature (64732)..(64732): n is a, c, g, or t
  misc_feature (83916)..(83919): n is a, c, g, or t
  misc_feature (86196)..(86196): n is a, c, g, or t
ggcaacctagtgagaccttttctctacaaaaaataaaaataaaaaaattagctgggcatggtggcatacacctgtagtcccaagctgaggcaacaggattacttgagcccaggaggtcaagactgacagtgagccgtgaatgtgtcagggcactccagcccgggcaacagagtgagaccctgtctcaaaaaaaaataaagtaagggctgggtgcrgtggctcatgcctgtaatcccagcactttgggaggccgagacgggcggatcacgaggtcagaagatcgagaccagcctggctaacacggtgaaaccccatctctattaaaaatacaaaaaaaattagccgggtgtagtggcgggcgcctgtagtcccagctactcaggasgctgaggcaggagaacggcatgaacccgggaggcagagcttgcagtgagccgagatcgcgtcaccactccagcctgggcgactgaacgagactatactgagtagactatacttgctgcaaaaattcaaaaaagtgtacggagcagatgagagcctccttgcccatcctcctcccctagtatagccttgaattcatctcccaaacagaataggatgggtcttttagttactctcgcagagggctctgtagtgctgataagagagctgaggagcccctcttaggttttcagatgacacgtcaggctagccttatatttaataatttaaatttaataataattatttcagttttcaagaaacttactgaatctcacctatgtgctaaatgttgctgattgaagatgggtaaatagcctctgaccttagggatctcattcctgtgttgaacactcgtgtgtaaaccaagggttacaatggtaatcccccagtgaatacatacagagtaccaattttagaagtggttgaaaagtttttttaaaaaatcagagaattacacatgtataattagctgctcatcctagaagtcatatatccagaccaggcgtggtggctcatgcctgtaatcgcagcactttgggaggctgaggcgggtggatcacttgaggtcaacagttcgagaccagcctggccaatatggtgaaaccccgtctctactagaaatacaaaaattagccgagcgtagtggcgcatgcctgtagtctcagctactcgggaggctgaggcagaagaattgcttgaacctgggaggcagaggttgcagtgagcccagatctcgccattgcactccagcctgggtaacagagtgagactctgtctcaaaaaaaaaaaaaaaaaaaagtcatatatccaaatgtaagagtactttgcaggtaagcctgactcagtctgacataggggtggctgtctgggagcagcacacccactccaggatcccccagaagcattcgttgtttctttctgtttttttttggttttgttttttctgttgcccaggctggagcagtggtgcgatcatggctcactgcagtcttgatctcctgggctcaaatggttctcctaactcagtctcccaagtagctgggaccacaggcacgcaccaccatgcctggctaattttaaaatttttgtattttttgtagaggctgggtcttactacgttacccaggctggtctcaaactcctgggctcaagcagtcctcccgtcttgacccccaaagtgctgggattacaggcatgagccactgtgcccaacctcattgtttcttttcattttggttattgagctctctctggataacatctgcagaatgtttcatgtgtcccgagtatgtgccaggccaattactcagcaattctgcttcaagaatcagtctgtattccattacaccagtggtacattttcaaaatggaaggaatataaaatgtaaaagtatttgctacgcagaggagggagacactactgctgggactagaatcgaagttttctcacacccagttcaatgccttttctacaacatccctcagttgagccttagggtaccaagtggatggtcattagtcttgtatggactttayatccaatgctgattataaggtctagatgatgctaggtggcagagattcaaagttggacaggtcggttactgtacttgataaataaacagcccagtggcaagacagataaataaactgaccatttacaccctgaaaaggtggtcagttgcttagggaactgggggaggggcgccaaatggaggagtagggacatggtagagagggcttttcagcatagtgagtgaatgaatgctcatttgaagaaacaacttgtgtttaagatgtttttctttcttccagagctagaatctggaagaatctctgggctttcctgctttgagggagagatcaggctaggtgcattgccaatttgctgctgaagatctgattaggttctgctttgatgtgatcaaatgagatgtaatcagtgctggtactttaagtgagtttgcaactatttagttgctctttttagtagtagtattagtaatggtaaaacttagtgcttttaggatgagagtagacggcctgaagaataatatcttgggctcttctaatcaagccatacggctcattggcaagtcatcagaggaaacatctatctatctatacattcatgcaataagtatttatttagtgcctatgtgccagacactgtttgtggggaaaacaagacacatgggctattattgcctcatggaaggaactaagctgtttggattttgaaaaatccctttctctgggcctcaattcctcgacctgttcagaaatgtgcgctcacaatggtcctagacatcttagattcaggttccattttcagttctttcctgtcctgcggccatctgcaagttaatttggtctccctgaacctcagtttcctcatctgtaaaatgaagatcatacaactcgtttcatcaggttgtactgaggctggaaaagatagtctaactactgacgcatcgtgtgctcagcctagggtggctgctaccgcgggtgcctgcggactcctaggacgggcaccagcccgggacccctgacaaggtgttgattagggtgtggctaagccccaggcgggagaaagcgttggcatttataaggccagggtctggcgcgstggcctcattccgtcttgaagtagaccctggagaggtcttccaggcttgggctcagcacgcgagcacagggagcgggggtgccggcggcggaggcgcgtacggcccgagcagcccccagcccccagcgcgcacacttgggccaggggcgcgaggagtgcgcggccgccgggtgggcgctggggagcgggccctgggggcggagcctgcagcccaccgccccccacacaccccagccgaggcccggaaggggccaggcgcgcttccgtctccgccggggatgcacggagggcggagctgcggcccgaggacgcgacgcgagcccarttccggcgaggaggccgcgccagtgacagcgatggcggcggagtcggcgctccaagttgtggagaagctgcaggcgcgcctggccgcgaacccggaccctaagaaggtaagcgagggggcggcgcgtagcgggatgggcgttgggtcggtgagggccccgtaacggtcgcggcccgagcgtggcggggttcgggggctgggaccctgagccaggccccgcggggctggggtcgtgaagttcgcggccattgaccgctgcccgcgcgttgggaccccgtgcgtcgggcgtcgggacgcggggccccggccgctccccctccctcacgggcccgggatgggggcgcgcccggtgcggacaccgcgtgcctagcgcttcctcccagaggcgctccgtggcgtcccgagccagctgtttcctgcgggagagcgtgcccggggcgggagggcgctggccgccgcctcgttggcctcccggtgcctgcgctggtgcccggctccccgcggagcggcgcggactccccagcgggtgcgtgttcgctgggaggagaagacgggcgcccgaacgctgcggagcctggactcgcggtctggtccgcgcctctcggagacgcggttactactctccggctggatatcagagcgtggacctttcgctttctcagtgaatccctttcaaaacagaataaagcctcgcgtcacctaagcatactcctgaaaacttaggttggaattgaaaaagaggcgggggcccggggttggaagtcgcagctaggtttccttttggccattaataggaaggtaagagctaccgtttctcgttgttcgagtgatggacaaccatttttaattgtagttaactagtttttgttgtttattgtacaaactgaayattaagttaaacgcgttcttgtaccttttcatctttctgtcactcacttctctggtctccaggagacagtctggtggttgtcaggatttttttttttcttttttttttttgaggcgagtcttgctctggtcgcccaggctggagtacagtggcgcgatctcggctcactgcaacctccgtctcccgggttcaggcarttgtctgcctcagcctcccgagtagctggtattgtaggcgcccgccaccacgcctggctaatttttgtatttttagtagagacagggtttcaccatcttggccaggctggtcttgaactcarytgtcaggattttttaagtggaagtacaacgatgaaaaagcacttatgtgtttggcattctccgtcatcattctggccggggcgggcagttctaggagttggaactcagtcctggtggaaaaggaagtcgtggagggagggctagggccgtgggggaactgctctgctgagcctcttcctcacctgctgcttcctaggactaacctgaaaggctaaggtaccaggctgaaagtcagtgctcagaaaaccaatcgtcattctttggggttttttttcttgaagagccactttctctttaccttgttctagcctgttggaggtagggtttctgcaattccaaaggccgtacacagcctctcaccatcagaccactttttaaggctcttcgttcatacctagctcgaagattcacttcctcaggaagccattttagttacaaatctgggaaaacttaaaatgctttcattgtgccatgttttctgttgcagcttcagtaccgtacctagtggtcaggcatacttacaagtttctttttacagtaaccccttgtggacatctaataaatggtcattattttttagtactagtttgttttcctgaacactgtaagatctgtgactgacgtttgataccttaaagcagtgccatataataactacccactatttgttctttatttctgtcagataaaaatgttctatgtagtgtctacagtcattttttttttaactagaatttagatttggaagtagtttttctattagttgatttgcatgaaatacaaaattaggaaaaggcttattccacctcaacctagttgaactattaatgatttttttttttttttgaggatttgggctctttctagatagaaaatcaccctgaacttctagctttgcattgtgaagtgagcatcatgaagatgagaaaatgttgggagatcatttttgcaaagggcataatagtcggcattcagatatgagttaactgcagagggaaaattgcaagctgtcatgttggccttgttcctctcaaccttctggtaacctaacaagctcctacaggttgtatgtgaaattgcaagatgattatatagccctgttgaatttacaaccagatcttgctttcaaaccattattagccaagggtttgattccacacctgtgttcatggattttttggtaytagacattgctgtaactctgttttcactttttcatctgttatcttggctcacttaagggagaaggtatcagcagcctaggaccacttggtttctgtttttatgtttcatagttcatggctgataaaaattacctgtccttaggccgagtgcagtgcctcacacctgtaatcccagcactttgggaggccgaggtgagtagatcacctgagatcaggagttcgagaccagcctggccaacatggtgaaaccccttctctactaaaagtacgaaaattagccaggtgtggtggcaggcgcctgtaatcccagctgctcgggaggctgaggcaggagaacactcgaacccgggaggcagaggttgcagcgagctgagatcgcgccattgcactccagcctgggcaacaagagcgaaactccgtctcaaaaaaaaaaaaacaaaaaaaacacacacacacagttggccgggcgcagtggctcacgcttgtaatcacagcactttgggaggccaagaggggcggatcatctgaggtcaagagttcgagaccagcctggccaacatgatgaaaccccatctctactaaaaataaaaaaattagttggtcatggtggtggtgcctgtaatcccagctactcgggaggctgagacaggagaatctcttgaacccaggaggcggaggttgcagtgagccgagatggcaccattgcactccagcctggacaacaakagcaaaactccwtytccaaaaaaaaaaaaaaaaaaaaaaaggatcctcgtcctgtgttacattttcactgtgaaagctaccaagaacattttgatggcaggtgacattaaaaatattttttgcttttttgggttgaaggattgtacaggggacaactgagatgcctcaacatgtaccttgcaaatgtttgatatttctcagttgcctgttaccagttcttacaagctctatagttggtatcttgtttgataacagcaagtttcgatccacctgaggatgcccaatgtgcctttgccttgttattgctttgttctttcttgaaatttactgaaaatagaggggttgtgaagtccttttttctcttgtgttagactaaatgagtctgaaaatcttgagggttttagttttgtctgcttttaaatcacccctaataacccaaagtaaagcagaaagacaggatttgttcttccagttagtgctaggctttgagataaacacacccacagtgacttccagcctcatccttatatgttggctttgtagaggtcctgggacacctttgttcccttggtgacctcctttactatgtgggttctgaactgtctaatgacatcacaggaggagtttttctgctttcttgcaagtatgctaagaagtatatgtgctgccgctctattttcatttcctaaggacagtgttctgatgttggatgcttctcctggctttacttaactgtagtagacacatttgactttccagcttgttaagcaagttacctaacctgattgggttcagttgcaatatctgtcaaatggggagaataacatccactttatagagttggttagtgggaatgaaatgaggtaacgtgtaagagcttagtgtagtagctgacacacaatagatggtatgtgaatattcccaacctaccccttccaaggaatggcattatgagagaaccacttgtttttgaccttttcagtgatttaaaattttcctttaagtgaaggaattggcattagtctttgcacccatagcttgggtggcaagaaacacaaaatttttcctgagttggatgatggtggtgataggatttgaagtgggggataattttcactcatctatgaaggtgagactccctagatatgccacttggcctcttacttgatctcaagattatcacttgtgatccaattgctctgtctggtgaccatgttaagtaatgattgaagtagaatgaccagaaaaacagacttgttactccacctaatagcaatatggcataccaattatagtctgggccacacatggtaaaagcagatcttgttatataatatttaaatgcaaaggtaaccacagttatctattttaaactacttgtattttgaagcactccttgtatggtaagtatgtttagatacacgtagacatttcctagagaaaggtttggccagtcataacttttgttagagcaagtaggaattggctgaggaatatctggttgaagatcaagggcagaacgctgaaagctgtcagtcgatgaatgaaatgataagtatttagtgagctttcatagtgttctagacactatgactaaggactgcacatggtttgtctctgaatcctcatagtttgtgaagtagagacaggaccaagttcctattttgcagatgaagtaactgaagtttggggaggtttttgacttattcaagatcactcatcgagtgacaaagccagattgtcaagcctgtctctgactccagaactccatcttaacagctctgctgtactgattttgacctagttttaggaactataggaaggaaatgtgatcaaacccagatcacttttctaatctacccaggcattttgtgtccaccgttaacatccaagctctgattctggcaacttgaaattactcttggctttacacttatgtagaagaaaacaattctgttaaacactgtggcccttctggaaacatgatggtcttttcctgtagaggccttttcttccttttacttcctctgtgccaggtccatgggtaattcccctaaaattggtacctttctcataaattctatcaaaactagggcaaaaatgatagttgttgatggcttttatcagagttggtaagttttgattctcttctctacatcttatttccccttggtgtagcacagtggttgaaagcagggaatctaaagccacagacctgagtgaatcttgccccacttgcatcttgggacaagaaacataacttttatgagcctattttcatacttgtaaaatagggatattacttactactgtaaataggcataatacttatactcattactgtaaatggttagcactaagcacttaataatcagatattcttgttaaagtgaatttgactattgaaattaatgttttcttctctgcagctattgaaatatttgaagaaactctccaccctgcctattacagtagacattcttgcggtaagaactgtgtgactttaaatattatataatgatatcccattcccttctcactggagagtgtgtagaataaggttacaagtatgggctttggaagtgaaagaaaccagacacaaaaggccatatattgtctgattccatttatatgaaatgtccagaataggcaaatccatagacagaaagtagattagtggttgccaggggctaggagaattgggaggaacaggatttctttttagggtaatgtaaatgttctggaattagatggttataatggttatataatattgtgaatgttctggaaaccaytgaattatgtactttagttaaagtggtgaatattgttaaatgactttatttcaaaattagaattaaaagaacattgactttggcatcaattagtcccagattcaaatctgagttctatgactttaggctgttcctatgtaaaatgggtctgattcctgcttcacagggttattgtaaagactgattcagaactgtatgcaaagctcttatcttagtgcctaacacctgccctaatcactcttgttattaaagttctgaacttggtacgctttgctactgtgtgtcattagagatttggggcatagacacaaagtaatttagtgttaagatttgcagggtatgttgtaggaaggaagtattgcttgttgagtttctcaaagtagaaagccttatttctttagaaaaacgttagcctagttccagacccctctaacaattactttgtcaaattttaggagactggggttgggaaaacagtaaatagcttgcgaaaacacgagcatgttggaagctttgccagggacctagtggcccagtggaagaagctggttcctgtggaacggtaagaacatttctctttaggtttgttcaatttcatggttaaatttacagatagaaaaggttttctttattatttctcttttgccttctgaaattgttttgcctcaattataaaaaataatccatgatcattgtagaatattagaaaatattaaaaatagaaatcaaaatttcctatttctatcacgcaaagacaaacgttatgaacattttggtacgtttctttttttttttttttttttttttgagacagagtctcgctctgttgcccaggctggagtgcagtggcgtgatctcggctcactgcaagctccgcctcccaggttcacgccattctcctgcctcagcctcctgagtagctgggaccacaggcacccgccaccacgcccggctaattttttgtatttttagtagagacagggtttcgccgtattagccaggataggatggttttgatctcctgacctcgtgatctgcccgcctcggcctcccaaagtgctgggattacaggcgtgagccaccgcggctggcctggtatgtttctttctaactgctccttaaatggcatttttttaagttgtgaactagataaatagtgagcagcccccattttatataacaaattaaacatgtccccatgttttaataaatctccacattttcatgtatatgagatatttgatctttgcatcttgtggttaaactcaccatttctcatttgggttttcccagttttaagatttgagtatctttaagcataacctacttatcttcttcttaagaccttgttgtttctaactctgcatcttcacttctttggtgagttcagattctgtgactttgtccctcaagaagcaagatttagacctactttgtctgctttttcttttattttagaaatgctgagcctgatgaacaggactttgagaagagcaattcccgaaagcgccctcgggatgccytgcagaaggaggaggagatggagggggactaccaagaaacctggaaagccayggggagccgatcctatagccctgaccacaggcagaagaaacataggaaactctcggagctcgagagacctcacaaagtgtctcacggtcatgagaggagagatgagagaaagaggtgtcacagaatgtcaccaacttactcttcagaccctgagtcttctgattatggccatgttcaatcccctccatcttgtaccagtcctcatcagatgtacgtcgaccactacagatccctggaggaggaccaggagcccattgtttcacaccagaagcctgggaaaggccacagcaatgcctttcaggacagactcggggccagccaagaacgacacctgggtgaaccccatgggaaaggggttgtgagtcaaaacaaggagcacaaatcttcccacaaggacaaacgccccgtggatgccaagagtgatgagaaggcctctgtggtgagcagagagaaatcacacaaggccctctccaaagaggagaaccgaaggccaccctcaggggacaatgcaagggagaaaccgccctctagtggcrtaaagaaagagaaggacagagagggcagcagcctgaagaagaagtgtttgcctccctcagaggccgcttcagacaaccacctgaaaaagccaaagcacagagacccagagaaagccaaattggacaaaagcaagcaaggtctggacagctttgacacaggaaaaggagcaggagacctgttgcccaaggtaaaagagaagggttctaacaacctaaagactccagaagggaaagtcaaaactaatttggatagaaagtcactgggctccctccctaaagttgaggagacagatatggaggatgaattcgagcagccaaccatgtcttttgaatcctacctcagctatgaccagccccggaagaaaaagaaaaagattgtgaaaacttcagccacggcacttggagataaaggacttaaaaaaaatgactctaaaagcactggtaaaaacttggactcagttcagaaattacccaaggtgaacaaaaccaagtcagagaagccggctggagctgatttagccaagctgagaaaggtaaccccttcagccccttggtggcttcccacccagagcacctggccctgcagagctcagaggattgccctgccactgttttccttagcttgcttttggggggcatgttgaatttcagtgtgcagtaatttcctctgggcttcactggttgtcagggtatatggtaccgcaaataagaattttctgcattattctcttgtgatgggctcatctgtatttatttcctgactgaggtggtgtcagacatgactgtggccccctccaacctggatcttcctgtgcaagatgtccagttaatgctcccgggaatagactgtaggaaagagagctgtgcttctactcactgactctccacccatgggtctgtcccctgcaggtgcctgatgtgttgccagtgttgccagacctcccgttacccgygatacaggccaattaccgtccactgccttccctcgagctgatatcctccttccagccaaagcgaaaaggtaattttctatatcttctttttcttaatgggaaaaagatttaaaaattcattcaaggcagggtacagtggctcacacctataattccagcactttgggaggccgaggtaagaggattgcttgcggccaagggttctaaaccaaccaggcgtggtggctcactcctgtaatcccagcactttggraggccgaggcgggcagatcaccttaggtaagaagttcgagattagcctggccaacatggtgaaaccctgtctctactaaaaatacaaaaattagccaggcatggtggtgcgtgcctgtaatcccagctactccggaggctgaggcaggagaattgcttgaacctgggaggtggaggttgcagtgggccgagattacgccattgcactcaagcctgggtgacaagagggaaactctatttcaaaaaaaaggagttctaaaccaccctggtcaacacagcaagatgctgtctctacaagagaaaaaaagtagccaggcatggtggcacatcccaggtactcggtaggctgaggtgggagtatcacttgagcccaggagttcaaggctgcagtgagctctgattgcatcactgcactctagcttgggtgacagagcaagactgtttcaaaaacaaacaaaaaaactatcaccataacatcagatttttgatgcatttcctaagtgcatagactctgaagtttgatggcttgggtttgaatcccaactctggtttctgcaagttatatgaccttgagaaatatcttaatttctttggaccttagttgtatatattgtgtaaatgggagttataatggtatctgccccatagggctcagtttaatgaattcagaagtgatgcctttttgctctgggtttatcacatagtaattgttcagtaaattgctgctgctgttattagcagccctttatcctatgtgttacataggatttttgtctgaaagaaaaaaatgtctaattttcatagcaaaagaagtagaagccacataagggtctatcagcaggagactaacagataaatcatggttcatctacacagtggcatcctatgccacagtaaaaaaaaaatgtggaaagtctatgcactgacatggaatgatctctcagatgtggcaaatgaaaaaaagcaatgtatgtagtgagtatgttattaattgattcattggcttaaaaggaataagatacatttgcttttttttgttgttgctgttgagagtcttgctgtgttactcaggctggagtgcagtagctccatcttggctcactgcagcctccacctcctaggttcaagcaattcctctgcctcagcctcctgagtagctgggactacaggtgcatgttgggcaggctgatctcgaactcttgacctcagatgattcatstgccttggcctcctaaagtgctgggattacaggagcttatttttaaattctctggaaggatctacaaaaatctgtagcgtggattgccattgggaaagggaagtaggaggctgaagggggtagaaggagagttttcactggatcacttagggccttttgtgtttttcttgccctatagcgttctcttcaccccaggaagaagaagaagctggatttactgggcgcagaatgaattccaagatgcaggtgtattctggttccaagtgtgcctatctccctaaaatgatgaccttgcaccagcaatgcatccgagtacttaaaaacaacatcgattgtaagtcacacgcttctctctagctctcaagcacattgtagcacttggaccttatcactgggtggcttggctgctactcagtgtcttcacctttggtttctctgcagcaatctttgaagtgggaggagtcccatactctgttcttgaacccgttttggagaggtgtacacctgatcagctgtatcgcatagaggaatacaatcatgtgagtattctgtttgggtgggaagagggcagttttctggcttgtacctccagaaatagctttgtccctgtgactccgctgtggctgaagggcagatcagtggtcagagcattgttctggatatatttggtttgccactgggcctttaaacaagcatgttattagcacttgctcctggcaccttaagtgggcctcttgggctaggatcagggtgggattcaaagggagaagaaaaacacttaacatctcccttgagcttgcctagtcatgaaggtaaagggagaattctggcagcagagtagctgggacccagggcggggaaagcactttgtgttgacactctgacatctggtgattggctggatgtctcttaagaaacatcaagatttatccagaatcctccttaggatgtagggtatacacatttgattgcatcagctgtctctctttaattctgaaagttctatgacctaacacctttttttttttttttggagatagggtctacctctgttgcttcgactgcagtacagaggcctaatcatggcttactgcatccttgaactcctgggcttaagtratcctcccaagtagctgggactacaggcacataccaccacagctggctaatatttttattttttagagagatggactctcagactcttggcctcctgaagtgctgggattacaggcatgagccaacgcgcctggccaataacttaacatccttcttaggttgcccctttgccatcacagttcagcgtagtgttgggaagtacctgatttgacttgatcgcagttctaccctttgctgattttctaaaggaaaagactgatgttacacagatttttgtgatattctgtcacagccaccaaaagcaactagcatagtgcctcacacttcgcatttttaaaatttagggagttatttttttcctagaattgtggtattttaacawactactaagatgaagaccaaaaaatttttgggaaactggtcactcctaggtaattaaataatcagaaaaagatatgaggctgggcatggtgacacacgcctgtaatcccagcactctgggaggccaaggtgggcggattatctgaggtcaggagttcgagaccagcctggacaacatggcaaaaccccatctctactgaaaatataaaatagctgggcgtggtggtaagcacctgtagtcctggctacttgrgaggctgaggcgtgagaatcgcttgaacccaggaggcaagggttgcagtgaaccaaaattgcaccactgcactgcagtctacacgacagagcaagactctgtctcaaaaaaaaaaaaaaaawatggaaaagtgcttgtacacaaatgatgtcctggttctggtttcaggtattaattgaagaaacagatcaattatggaaagttcattgtcaccgagactttaaggaagaaagacccgaagagtatgagtcgtggcgagagatgtacctgcggcttcaggacgcccgagagcagcggctacgagtactaacaaagaatatccagttcgcacatgccaataagcccaaaggtaacagagacgggagagctgggggagaactggcaggatgagtgttctggtcaatagcagggtgttggtgggcttggctggtgtaggactgcttgcccctacatcaggtagcagggtgggtatttcttctgccaccgcccattctaccctacaagtggggtttcagggcactcaaaaagcccgtggattatttaaataacagtagcatctctgctcaagaaggcagatgttcatctccataattccacaggccgacaagcaaagatggcctttgtcaactctgtggccaagccacctcgtgacgtccggaggaggcaggaaaagtttggaacgggaggagcagctgtccctgagaaaatcaagtaagatctgtgttcttacctggcttttgtgtgctatcaacccttagaggtagccatagcggcaggaagcaaattgcttttggtgaaagtgaggcagtgcagactgtgggctctggaggcagacctcatcagctcagcacttccctcacctccctcagcctccgcttcttggactgcagtgcaaggtgataattacccctgccctagggtagtcaagattaaatggagagcaaagcctggcttatgggaaacattcccttatgctttcccttttcccatctaaacaaaaaacacatttctgcaatgattgttattttgtctaagccacattagccttttcaaaatacagatttataccaaaacagtgaaaagttagttgagattatcattttttctgaaaggataatggagacatctctgagccaccaccagaatccagggtgatagggtccattggtcaaagccacaaacagggtgagtcatcctcacacaggccagcttcaggctgttcatgctcagggcagatttcttgtgctcatgcctaaccagtgttgtcctgtgttgcaggatcaagccagccccgtaccccatgggaagcagccatgcttccgccagtagyatcagctttaaccccagccctgaggagccggcctatgatggcccaagcaccagcagtgcccacttggcaccagtggtcagcagcactgtttcctatgatcctaggaaacccactgtgaagagtaagtaacttggagttcctgctcaaatattatytcagcactagtttttaactctcaatgtcattattcactgtattacattttgtggactgcatgttgcatgtacatgatgccttgcacatagctggtctgaatgtcagtccctccttccccctgctttgtccatagtgcattatatctcttaaatagttatagtgagtctgggtgcagtggctcatgcctgtaatcccagcactttggcaggctgaggcaggaggatcccttgaatccaggagttcragaccagcctggacaacataatgagaccctctacaaaaaattaaaaaatagggcatagtggtacacacctgtagtcccacctactcaggagactgaggtgggaggattttttgagatggagtctcgctctgtcacccaggctggagtgcagtgscacaatctcagctcactgcaagctctgccttccaggttcatgccattctcctgcctcagcctcccaagtagctagaactacaggtgcccaccaccatgcccacctaattttttctattttttagtagagacggggtttcaccatgttagccaggatggtctcgatctcctgacctcgcgatctgcccgccttggcctcccaagtgctgggattacaggcgtgagccactgtgcccggccgaccctgtctctggaaaaaaaaaaaaaaaaaaagtgaaagtagaaaatagtatctggccaggcatggtccctgtctctattaaaaatagaaaaattagcccaccatggtggcatgtgcctataatctcaggtactcgggtggctgagacaggagaattgcttgaacctggcaggcagaggttgcagtgagctgggattgtgccactgccctccagcctggatgacagagtgagacactgtctctaaataaataaataaatatcattgtgaatgaccattttggcactcttcttttttcacctaaatataaactgacttctctaggcaataccacagtgttcataattactaatattaacagctaaatgacaggccctcttactgtttttttatagwcttataactctagcttccaaatatttattctttatatctaattgggtcttccaatttatttwtttwtttttttttttttttttttttttttttttttggagacagagtctcactctgtcgcctgggctggagtacagtggcgtgatctcggctcactgcaacctccacctcccaggttcaagcgattctcctgcctcagcctcccaagtagctgggattacaggtgcccgccactaagcccagctaattttttgtatttttagtagacacggggtttcaccatgttggccaggctggtctcgaacccctgaccttgtgattcgcccgcctcagcctcccaaagtcctgggattaccagcgtgaaccaccatgcctggccrggtcttccaaatatttattctttatatctagttgcgtctattttgtattttgttaactttattaccatagactatccccagtatcctaaggggatgtcctaacttaagtcttattctgtattaattgcagggcccatgggagggtgggagtcctggcttgagctacagctatgctcagatgaaccattcaggaggcaggctggccttccttaggcagtacttgcatagccaccttagacctgtttctacactggacagattgggggtagacstgctgtttactggtttggctatttgtgaggcaaagttaagttatgactgagtatggcctttagagtctggcaagggccggggcacagtggttcacacacacctgtaatcccagcactttgggaggctggggtaggagggtgcttgagcccaggagatcgagaccagcctgagcaacatagtgagaccctgactctacagaaaataaaaaaaaattagccaggcatggtggcacactcctgtagtctcagctactctggagtctaggaggtagaggctacagtgtgctgtgattgtgccaatgcaccctagccagggtgacagagtgagactctttccttacaaaaataaaaacaagaaagtctgacagagattgaattgtaattctgtaccttactgtacaaccatgggcaagttggccaggctctctgagccttggtgcaggtggttagagagagtggtggtcatgcccctggcaggtcctccgaaagtgtctgctctgtgctgttgcttttattgcattgtgaacagaggagatagttactacttgtatctctgcctggtggtgcacagccaagaatagcagagctggctttgactgtaaactactgggggtgtgtctaagccgccacagatctgagacagctgccttgtttctcttttcacagaaattgccccaatgatggccaagacaattaaagctttcaagaacagattctcccgacgataaactgaggacttgccttggaaatggaatctggggaggcaggaatacaaggacagtgggggttggggaatggaattctacaggagactggagtcttgctttgtggatccttttggtctccgagtcctgcagtctgcaggtgctgcccctgggaacctgcgtgccacagccccgcctccctgcctggagcacactttagaattctgaagatgtgaagcctctgtctcactgaggattttaaaggtcaattatacttttgttgttcattagcatctttgtaaactataagacgtagttttaattaataaatattgcccccagattgtatttatattatcccccaggtttgtttttgttttttgtcctctaccacacatttagccttttatcttccaggtccttattaaaatcagatgaaagcctagtgaaagccagtctcctgccccagctcagctctgtgtggactctggtccagacagaggactgggcatctccagagcctgcacagtacctgctgcacgtagggcaaggaatgagcactagaccgcctgtccccaagggagcctcagtggggcgacagggtgctcggcggactccacctcaggccctccccactgttgctgtgcattcctgtgcaggtgcatctctttcttactaactggtatttattaagggaggtgctctgtaggtctggagcctttccctcatcctttttgcgagtccccacctttttgttttttttttttnctttgaggctcactagaggacgcagaaccttgggagattgatttgcacagaactccccacctcccacttttacaatttccagtttctgattgaaaattttagggtttctccccactgcccttccctatctttccttcccctcaacaccatgaaggaaaaacacacacggcagggctttttgtagccctgaaggcaactttagacatttaaaakccagcactttaatctcttgttctctgtgaatcactatgagaagtgaatggttttaaaggctgtaatgctatgttggaaattggtttgttttgccttttattgaaaaggtaagatcatgtgattggaagaacacaactrttggcttgggaagaggactttgctgytgaagtgttttctaccttctgagtgtgtttaaggcaggatttggagggaaggaccagcttagggagagtgtctgagccacagcgtcaggatgggggaaaccacatgggatccatcaagttccagttgaacaggagcaagatcagaacttaggagggcagtgtcagctcccttgttggctgtcaaggaacaccgatctagtagaaacccacttggttgtgacccaggtagaggtagatgccatacatttgagatatgcgtccttaaggaacctgacaagcagactgaagggatggtaagtgtgacagcctgataagttttctcaaagcccaggatacagagccagtgttttctgtaactggagacctcagttaggccaacttcgaattccagagcaacgtaggaagtctattcagcagaaactcgacattgttcagtgtgtattgctgtgcagggtgcctattgtgacaggacacaaatgttactatgttttaatttgctatatttttgaatgggtaaagcattactttacttctcttggttacttgtaccaccattccacccctatccctagcctgccccacaaatctaatattaggaagcctcttaactgaaaccaaatgaacatttgggtcaggtgccagatgtctgctgcctagaatagctttttctaggtgtctaccaccttgaatttatctcttaactgtgtgttcaagtctttgtcattgaaactagtttttcatatcttagattcagttgtgtatgatttaatgtcccttattaggagtctttaggcagggagggaagaaaaaacagatttgttcatagcaatgtcagtatccattttggcacataaagatttttgatgagccctgtttgcatagagccagatgttttcccctcccccaagagtatctacatcagggatgtgacttggtgcgaagartcaggggaaagaggaaaaacccaatttctaaatgacctccttgcccagcttactaaaatggctgcagagcagacacaggatgaatttgaacctgacacaggatgaatttgaacctttggtctcatttatggaaaaacttgtgcaattttttttctgtgctacactacatacaaatcaccaaattacaaattacccttttgtgatccttggtgtactgagcagtttctttggggctttttctttctgggaagcgggagggaaaggagcaaggtgtcatcctgctcttcatttgtattttggtcccaaaatgtaaatacaattttctatgttacttttttgtggtaactaccgagatgaatattttaattagataagttatatgaaaaggaaaattccatgtctaaataaaaaacaaactccatatactgtgtcttccttacttatagcatcagtggaaagaagttagaaaatgcctgattcttggactgtttaaggcagagtttttttttttgtttttttttttgagatggaggaggcaatctcagctcaccgcaccctcctaaggcagagatcttaatcagcatccttgggctgggccttaaacgatgccgaatttagtagtaagaggaatttcagacggaaagaattctgtgagcaaagggcgggaactcagcatttgtggggaacaggcactgtcccttattatacttggaaccctggtaaccccatcttaaaattagaaactggttcaaaggggtgaaatggggccgggcatggtggttcatatctgtaatcccaacactgaagggcggaggcaggattgcttgagcccaagagttcaagaccagcctgagcaacatattgagaccctgtctctagaaaaagattaaaaattagccaggtgtgatggtgcacctatagtcccagctatgtgaaaggctgaggtgggaggatcacttgagcttgggaggtcgaggctacagtgagctgtgattatgctactgcactccagtctaggtgacagagcaagaccagcctgggcaacatggcaaaaccccatctctttttttgtctcaaaaaaaaaacaggggtagggggttaggagggactgtggctcatgcctgtaatcccaacactttgggaggccaaggagggtggattgctggagttcaagagtttgagaccagccttggcaacatggcaaaactctatctctacaaaagatacaaaactagctgggtgtggtggcacacacctttggtcccagccactcgggaggtagaggtgggaggatggcttgagcccaggaggttgaggctgcaataagccatgattgccactgcagtccagcatgggcgacagagcaagaccctgtctccaaaaaaataaaaaacaaacggggaggggggggaaaggagtgaaattaacatggccaagttgcgtagctaataaagtggcaaaaggaaggatttgacaccgtgattctctaactgcaaggtttgtgccactctgcctttcagtttccacgggctgtgagggaccagtaggtctcagcttacacgggcgttctaatgagtacagaaggaacatgaatgcaggaaagtcgtgccagcaaagacttaatgagaacctgctgtggtggctctggctgacctgcaggagctttagcacttgctaatggagccatggatttggcttcaaccctgcatacagcaagtggattggaccttccatcaaacatacaaatctgtcctttatcgattaattaaacatttgctgagccaggacctgtattagaccttaggatatggagtaatagactctgacacttaacagttagggaggagtaactgactttattgattatgcacctactaggtgccaccattccttcttctgtacactgcctctgttatcacaatgatcctgtgaggtaaacagtcatggccccattttaaaaatgacaacttaatcctggtaaatccaggggattaaaaaataaaaatgagaacttaagtcaccatagtgtctgtagaaataaattttaaaaaattgttttaatgaaaatgagaaaaaccgaagcacagagagatgaagaacttgcctaagttcacagaatcagtgagcagtggtgctatgtattggcctgactccaaaacacatgctctcagtcacatttaccatctcatacactgacatgcatacccaatttggcctctgaagcaaagctgacctccaaaacaaaagatgcctgagccaaggccagagtcgtttctgttttttttttttaaattctttttttgtgatggagtctcgctctgttgcccaggctggtgtgcagttgcacgatctcggctcactgcagcctcagcctcgcgagtagctgggattacagacatgtgccaccacgcccagctaatttttatatttttagtagagacagggtttcaccacgttggccaggctggtctscaactcccaacctcaagccatctgcccgctttggcctcccaaagtgctgggattacaggtgtgagccaccgtgcccagcctaaaaattctttatcctcaagttcaacagtcatttytaagaatgatatcttttgtctgcttcatgtaactgatgcccagcagaatcctacctggcttatcaacttgacagatgcccccatcacagggtttctcatccactttcatctcttcctggttatttgctaaatggtgaaacagtttgtcttcagaggcccctgaacttctttctctcactctttttgagacagtctcactctgtcacccaggctggagtgcagcggtgggatcttggctcactgcagcgtcaacctcccaggctcaagtattcctcccacctcagcctcccaagtagctgtgactacagatgtgcaccaccactcccagataattttttggtatttttttgggagatggagttttgccgtgttgcccaggctggtcttgaactcttgagcttaatcactctaccttggcctccaaagtgcagggattacaggcatgaggcacctcgcccggccccctgaacttctctatgatgtctattgtctcaactcttttcaaagactaaggaaagttccagccatcaaaattttatatcactgtatctgtttctcaagcacagagtcttgggttggggcctcagaatatgcatttaaaaagatgcaactcaagtgttatggactaaatgtttgtgtccccccaaaatgcctatgctgaaatcctaagacccagtgtgacagtattagataggcctttggaggtaattaggtcacgtgggtagaggcttcatgaataggattctccctcataagagaaatgagagttgctcttgctccttgttctccaccatgtgaggaaatgagaggacggcagtytgcaaaccaagaagagggccctcaccagacacagaattggccagcgccttgatcttggacttccagcctctggaactgtgagaagtaaatgtttgttgcctaagccagtcagtytatggtaagttgttacagtascctgaaatgactgagacactaagcgattttttttttttttttttttttttttttttttttttttttttttttgaggkgaagtctcactctgtcacccaggctggaatgcagtagcttgatcactctcggctcactgcaacctytgcctcccgggttcatgtgattctcctgcttcagcctccctagtagctgggactacaggcgtgcaccaccaacttttgtatttttagtagagatgggtttcaccatgttggctaggctggtcttgaactcctgacctcaggtgagatcaggtgagatccacctgcctcgacctcccaaagtgctgggattacaggcatgagccattgtgcctggcctgacactaagcattttttttttggggggatggagtcttgctctgttccccagactggagtgcagtggcgtgatctcagctcactgcaacctccgcctcccaggctcaagcgattctcctgcctcagtctcccaagtagctgggattataggcatgcatcactacaacccggctaatttttgtatttttagtagagacggggtttcaccatgttggccaggctagtcttgaactcctgacctcaaatgatccacccgcctctgcctcccaaagtgctgggattacagtcatgagccaccacgcccggccgacactaagcaattcttaaaatgtacactgaagtttgagaactgctccagagaatttgccacagtggaatagctcttcacagcaggtccctaggtcaggactaggaagcttgttgatttagtagtaagcaaatacttgcattgcttcccactctgtgtcactgactaagtcagacatggcaggctggggacagtggctcacagctgtaatcccagcactttggggggccaaggtgagagattacttgagtccaggaggttgaaactarcctgggcaacatagtgagatcttgtctctaaaaaaataaaatattaggccaggcgcggtggctcatgcctgtaatcccagcactttgggaggctgaggcgggcagatcacctgaggtcaggagatcaagaccagcctgaccaacatggagaaaccccatctctactaaaaatacaaaattagccgggtgtggtggcacatgcctataatcccagctactcgggaggctgaagcaggagaataccttgaacctgggaggtggaggttgaagtgagccaagatcatgccattcaaaataaaataaaaataaaacaaaataaaataaaatattagttgggcatggtggcatgaacctgtagttctagctactcaggaggctgaggtgggaggattgcttgaactcggggaggttgaggctgcagtgagccaagatcatcccactgcgcaccagcccgggtgaaagagcaagaccctgtytcaaaaaagaaaaaagaaaaaaaaaaaaaaggccaggcatggtggctcatgcctgtaatcccagcactttgggaggtcaaggcagatgaatcacctgaggccaggagttcgagaccagcctgacccacatggagaaactccgtctttactaaaaatacaaaattagctgggcgtggtggtgcatgcctgtaatcccagctacttgggaggctgaggcaggagaatcgcttgaacccaggaggtggaggttgcggtgagccgaaattgtgccactgcactccagtctggacaagagcaaaactccgtctcaaaaaaaaaaaaaaaaaaaaaagagacatggcccttgccctcatgaagctttcatctagtagggagacagttatcaaataactgcacaaataattcttttttttttttttttttttgagacaaagtcttgctctattggcaggctggagtgcagtggcgcgatcttggctcactgcaacctccgcttcccggattcaagcaattctcctgcctcaggctcccgagaagctgggactacgagtgtgcgccaccatgcccagctaatttctgtatttttggtagacacggggttttaccatgttggccaggatggtctcgatctcttgacctcgtgatctgcccgcctcggcctcccaaagtgctgggattacaggcgtgagccaccgcgcctggcttttttttttttttttttttttttttttgagacggagtctcactctgtcaccagggctggagtgcagtggcgcgatctccgctcactgcaagctccacctcccggttcacgccattctcctgcctcagcctcccgagtagttgggactacaggctcycgccaccacgctcggstaattttttgtatttttagtagagacggagtttcaccgtgttagccaggatggtcttgatctcctgacctcgtgatccacccacctcggcctccaagagtgctgggattacaggcgtgagccacggcgcccggccacaaataattctttaaagtacaggtttctgggccctactgaagaaatatggttgaataggtcaaaggtaggatctggaaacaggtacgcttttgtaggcttcccccaatgaactcgatgagcggcctggtttgggaatgtctagtgtagtggaaaaagcatgcatgacctttgggatgagacccaggttcaaatcctgcctccaccactcccacacctctctgagcctcagtttcctcattggtaaaatgggaattatgacactctgcaggaattcttataaggattcaatgacagaaggggagccacattttagtgtccctccttctttccctctaaatgtggaatgaaagaaaaaggttttgttttttactgatgggaattcaaacttcagggtcacaagctaagaactattttgaggtcaacaagtccttcctgataaatgaaatcttagtgcctgcttcctcagagttagtttgacttttctgttttggggccccattctaattttttcgggtcccttaaactgcagcttctaacaaccactaaaaaggaagaccacctaatttcttacggccacaaactcaaataccaggggtttggtatgtgacagcaggctgtgatgggaacagaaagaaaatggagctattcacacagctccactttattgcttccgggttgaagacagggcccagtgttgccacctcttctggatttaaagaaaatggccggccaggtgcggtggctcatgcctgtaatcccagaactttggaggtgaggcaggtggatcacttgaggtcaggagtttgtgaccagcctgccaacatggtgaaactccgtctctaccaaaatatacaaaaattagccaggtgtggtggcgtatgcctgcagtcccagctacttgggaggctgaggtgggaaaatctcttgaacctgggaagcaaagtttgcactgagtgacaaagctccagcctgggtgacaaagtgagaccctgtctcaaaaaaaaaaaaaaaaaaaaaaaggaaaaaggaataggctcagcagtagttctcaactagaggtgactttgttcccagtatgacacttggcaacatctggagacattttggttgtcgctgttgttggggagctatgggcatctagtgggcagaggccacggatgctgctatccatgctacaatgcacaagacagcgcccctcccccaacaaagaattatctggccgaaaatgtaaatagagccaaggttgagaagccttggacatggttctgttgcagcaacaaccctcaaatctcagtggcttgcaacaacagaggtctcaccgcctgtccattgtgagtctgacagggatctgctttatgtcatcctcactcaggggcccaggctaagggaggtgccattcccatgcttgtaagatcttcgaggcaagtagagaatattaatatattattaacattaattataataataaaaaataatattaattacaatattgatataactgttaagttttgtctagaagtgacatctatcattgccatcatattgcattggctgcaccttaattcatggggtcaaggaagcacaatccatccatgttcctggatgcagagaattgggaatatttgctaacagcattaaagattccaaaggttgggtgcaccaaaacctcagagatcaccactaaagaacttattcatgtaaccaaacaccacctgttcccccaaaacttattggaaaaaactaaaaatccagagaaaaatgtatgctgaccaaaaaaaacaaaaaaacctccaaaggtaatcatgacagcctgggctctaggtaatccacaaggctcagagaagggcagctaagggcacaggctgtggagtcagacgtcagacttggcttcaaaccccacactttctagccatgtggacttgagcatgtcacttaatctctcagtttctttctctaaaaatgaggaaaataggctgggcgtggtggctcacacctgtaatcccagcactttgggaggcccaggcaggcggatcacgaggtcaggagctcgagaccagcctggccaatatggtgaaacccggtatctactaaaaatacaaaaattaggccagacgtggtggcccacgcttgtaatcccagcactttgggaggtcaaggaaggcgggtcacgaggtcaggagttcgagaccagcctgaccatcatggtgaaaccctgtctttattaaaaatacaaaaattagccaggtgtggtggtgtgagcctgtaattccarttactcaggaggaagaggcaggagaattgcttgaacctggaaggtggaagtcgcagtgagccgagattacgccactgcactccagcctaggtgacagagtgagactccatctcmcaaaaaaaaaaaaaaaaaaaaaagtctgggtgctgtggctcacgcctgtaatcccagcactttgggaggccaaggtgggcggatcacgaggtcaggagatcaagaccatctctactaaccctgtctctaataaaaatacaaaaaattagctgggcgtggtggtgggcacctgtggtcccagctactcgggaggctgaggcaggaraatggcgtgaacccgggagatggagcttgcagtgagccgagatcatgccactgcactctagcctgggcgacagagtgagactctgtctcaaaaaaaaaaaattaattaattaaaataataataataataattasctgggtatggtggtgtgcgcctgtagtcccaggtactcaggaggctgaagcagaagaatcacttgaacccaggaggtggaggttgcagtgagctgagattgtgccactgcactcagcctgggtgacagagcgaggctccatctcaaaaaaaaaaaaaaaaaaaaaaacaagggaaaataaatcaaccttgcagtgttaaaatgcttagaacagtgcctggcacacagaaacagctcaggacatgttagccaggatgatgatgatgatggattaggccaggcgccaatcacggagtgggcatttagtaaacagttgttgttataacctaagctctgaggaaaatgacttgtccaaggtaacacagctggtaagtgcagcatggtggagaagagcctaagctctggggtctcagcctggcacatcgtaaatcataaatattaaataatatttggaggaggttcagtgtggttaagaacatggactcaggccaggcacggtggctcacacctgtaatcctagcactttgggagcctgaggcgggcagatcacgaggtcaggagatcgagaccatcctggctgacacggcgaaaccccgtctctactaaaaatagaaaaaattagcccggcgtggtggcgggtgcctgtagtcccagctactctggaggctgacgcaggagaatggcgtgaacccgggaggcggagcttgcagtgagctgagatcgcgccactgcactccagcctgggsgacagagcgagactctgcctcaaaaaaaaaaaaaaaagaacatagactcggtagctcacacctataatcccagcattttgggaggctaacaggggcgcatcctttgatcccaggagtttgagaccagcctcggcaacatggcaaaactccgtctctacaaaatatacaaaaattagccaggcatggtgatgtgtgcctgtagtcccagctactcaagaggctgaggcaggaggatcacttaagcctgggggtgtcaaggctgcagtgagctgagatcacgacactgcactccagtctgcgtggcagagcaagaccttgtctcaaaaaataaataaataaaaataacatgaactcccgaggctgactgccgggttcaaatcctagctctactactgaccacctgtatgaacttgagcaagtaactcagcctctctgtgcccagttttctcatctataaaatgaagctaataataaaacacctgcaattaggaaaattaaaaaataacattagtaaagccctcgggacccatatggttgttagctgctacagtattactatgccctcagttcgccacaaagaagcattcaaaagtaacagaaaataattaacagtatcatttcacccacccaattgagataggagagaagaaaatggatacaaattcagcaatccttgagctaagaaaatgtttacagccaggggtggtcgctcaggcctctagtcccagcagttagggaggctgaggccagcagatcacttgagtccaggatttcgagaccagcctaggcaatgtgatgaaactccatctctacaaaaaatacaaaaattacctgggcatggtggcatgcacctgtagtcccagctactcaggaggctgaagtgggaggactggttgagcccaggaggcagaagttgcagtgagccaagactgtgccactgcactccagcctgggtggcagagtgagaccctatctccaaaaaaaaaaaaaagtttataaatggagcaatgggaaaaaacttggatgcttttyttacctgccccagggtagtcctagaaatcagtgagaattcccatttgtcctcagagattcctgcaacataggagtgcaagagaggagacagtaagcagaggcacaaggcattactcccaaatcacagctaagccaccctgcaaccctggccggctccttacaaacccagctcccttagcaactgcagtttcccatccaaccagacgagggcgccgagctgacagtcttgctgctggcaatagtgatagccgctgtgaaagcacagtagatgctcgtccacttgtcgaggagaatgctgaattcttaccacttttgcaccactgtaaagtcacaaagtcataagtcgaaccaccataaactggggattatccgcagtccccccttatctgtgggcgatatgttccaagaccctcaggggatgactgaaatagtactgaacgctatatatacagtactatgcttttttctatacatacatacctatgattacatttaatttataaattaggcacgatgagattaaacaactaataataaaatggaacaattatagcaatatgatgtaatacagttatcaggcactgtgctcataacttttgcagtttcatgtgtggcagcaaaactagcaggtatttctttttccttcttcataatttcacagatagaagattcgttcttactacagatcttagcgacctcagcacactttattttttctttccttattataacttttaccttttcatttaaagaaagaactttatggcttctctttgccatatccaaattgctagcatgactactcttgcactttggggccattattaagtcaaataagggtgacttgaacacaagcattgcaatatcacggcagtcgatccgataacgaacagggcacttacttagtaagtgactaacgaacagggagtgtatacagcgtggaggcactagacaaagggacgattcaggttccccaggtggacagagcgggacagcacaagacttcatcacgctactcaggacagcatgcaatttaaaatttacagatggtttatttctgaaaatttccatttaatatttttggacagtggttgactgcatgtaactgaaaccacagaaagcaaaaccgagtcaggggcaggggaggggggcggctacagtaatagcctttccctgtggaccagatgttataccaaacactttcatgtgttatttcacattactgtcatagcactccacaacataggtactgttatgattcccattttatgtaagacaaatctgaggcctagaaaaataaataaataaaaagaaaaaagaaaaaaatctgagacctagagaggttaagcaatttgcctagcaggccaaacctaatatttgcaggacaggagcaagaatacagctgaatgcatacttaaaaagttataaatgaccctaatgaactattaaataaaagacaatctattctgctatgtcaataaataaaccttcacaatgacctggaagaccacattcacatttttgggcctctcagagttctgtactagaaggtggtgagaggcagagaacaggaccctagccctgccccattctctccatatctctaaatctgtgtgcctggaagggycttgtgtccacgcatgcagaggtcctaacctgtgtgctcacactttgttctaggggttctaaattgaaaaggtccctcaggtatccagcacaatgaatgacaaaagagaccaaagcacaacaaaaatcatcacattctagaataccaagagaagatcttaaaagcttccagaaaacggggtggggtggggggaaaacccataaaaagaatcaggattcagaacagcattgtatttatcaaagccagaagaaaaccagagcaatttcttcacaattatgaaagaattctatccacagccaaactactaattaagtacagtagaataaagccattttcagtgccacttaacatgtatggcagcatggtagccagccactaaggtggcctctaatgatttctacctcctggtatctgcactcttatgaagttcccgcacacactgaatatggctgacctgtgaaaccatgggatgttgcaaaattgacaatatgggacttctgtggctaggtcataaaagacattggtggtttctaccttgcccttagatcacttgttctgctgaaaaccagctgctgtatcatgaggacactcaaacagtactattgagaggtccatgtgttaaggaactggggcctcctgccaagagcctgcacaaacttgccagccggggcttctccagccctggccaagccttcatatgatttcaggctcatgagagaccccaagccagaaccacccagctaggacgctctcaaattcctaactcacagaaactgtgagatgataaatgttaattgttgttttgaggagagaggccatttctcttactgtctctgaagagaaggaagaagtaaaagctgaaaaacaacaggaatgaagtcagtggcaagaccaactgatgccacttaccaggcctgaggttaaagattaacgcccccaccctaaccacatgtgttacctatagatcacttgctcaatctatcacaaccctttcacgtggacccccttagagttataagcccttaaaagggccaggaactttttctttggagagcttggttcttgagacacaactctgccaacgctcctggccgaataaagtctcttccttctttaacctggtgtctgacaggttttatctgcagcttgtcctgctacagttttaagccattaagtttgggaataatttgttacacaacaaaagacaactaatacagacctactgggaggggaggagccacagtattttgcagttcttccaatcaggaggtgaagtctacagtctagctctccactctagaatttggatttggctgatgggtcattatagaaagattatagatgtaaggcttaaaaagtgcttgtgctggcagggcgcagtggctcatgcctgtaatcctagcactttgggaggccgaggtgggcagatcacctgaggtcagaagtttgagaccagcctgcccaacatggtgaaaccccatctctactaaaaatacaaaaattagccaggcgtggtggcaggcgcctgtaatcccagctactcggaaggctgaggcaggagaatcgcttgaacccgggagggggaggttgcagtgagcggagattgtgccactgcactccagcttaggtgacagagcaagactccatctcaaaaaaaaaaaaaaaaaaaaaagtgcttgtgcaattgagtcttgccctctcttgctcctgggaactctgcaattatcaccatgtaatttagctaggcttgtctgctggagacacgtggtcccatcatcccagctaacagccagcatcaagcagacgagagtgagaccatcccaaactttccagcccaagctgaactggcccagaaamgctaatccacaggatcatgcgaattaatcaatgtttgttgtttaaagctatcaaagttttagggtaatctgttacacagcataagctaattgatacagcatatttactttgtgtgcacctcccgcctcaacctccccaccctaaccaggaaactactgatgtgttacaagaacactacaggatgtgttcaaagcctggttacctcctaactttacctagtctcagacaagttagtttgcctctttcagcctcagttttcctcatcttcaaattggagataacagtaggtaatagcacctagctctcttttttttttttttgagatggagtctcgctctgtcgctcaggctggagtgcagtggcacaatctcggctcactgcaacctctgcctcctgggttcaagcgattctcctgcctcagcctcccgagtagctgggattacaggcacacgctacgatgcctggctaatttttctatttttagtagagacggggtttcaccatgctggccaggctggtctcaaactcctgacctcaagtgatctacccgcctcggcctcccaaagtgttacaggtgtgagccaccacacctggctgtacctagctcttaaagttcatgtgacaattaattgagatgaactacataatgtgcttagcacacagtgctcaaataaatcattaatgaaggcaacaggaaaaagccaaaatgagtagatctccggggtaaggcctgagttggttcttcaaaaggacactcttaccaaagaaaggctaccaagtatatcagtcaagtaaacatttactgtttgccacattccaggtcccttacctgaaactgtgacctaaaagcaggaataattcacggcactgagctattttgaaacagaaccaagcttgcttattgcacaagtaactaaaataggacatcaaaatatttttcttgtttttatttttttgagacagtcttgctctgacacccaggttggagtgcagtggtatgattacagctcactacagcctcaccctcccaggctcaggagatccttccacttcagcctcccaaatagctgggaccacaggcatgagccaccatgctgggctartatttttaattatttttgtaaagatggggtctccctatgttgcccaggctagtctcaaactcctgggctcaagtgatcctcccaccttggcctcccaaaagtgctgagattacaggcatgaggcactgcatgtggcccagaaaatatttctgaatggaacttgaaaaaatggatattttggtctatacttcaccagccccactgagcactccagagccagatgtgaagggaagagggtagccagggtatcccataactctctttctgtatcctgtcttttccccaccagggagtaggaaaacattctatcctgaaaacaagattatttcacctctaaacagtgacttttaattattttgatctcaacccacaatatgaaaaacacatcatattgtgtctgaatacaaactcaaaactgaaacaaaagtttcatcaattgagacttgaaatgtgtgatacattctgggtttttttttttttgtattctattttttttttaaatgttgatcacaattctctataaacggattttaaaacctattgacaggccacaaccagctgttcgaaaaaaagtactttgaaatatcacatgggggaggaaacgcagagatcatctagtccaatcccttcacttcacagggggtaaactgagtctcagaagatcaagtcacttgcccaaggccacgcagctagtaagttgctgtggttggatttgaccgtaataaccatcggctactgaatgcccatcatgtgtcagccatttgctgagttttttctttttttttctttttgagacagagtcttgctctgtcgccaggctggagtgcagtggcgcgatgtcggctcactgcaacctctgcctcccgggttcaagcgattctcctgcttcagcctcccgagtagctgggactacaggctcgcgccaccacgcctagctaatttttgtatttttagtagagacggggtttcatcatgttggctaggatggtctcgatcttttgacctcgtgatccgcccgcctcggcctcccaaagtgctgggattacaggcgtgagccaccgsgcccggcctgctgagttctttaattgcattatttcatttaatactcactgtgatcctatgaaacagatactattctttccaccttacagacggggaaacggagtctcagaataggggaaatgacttaaggtgtcacaatggccagtagcagacccaggagtagtctttaggtctggccgtgcacaaagccccatgctctcaagctgtaaccccgctatcaagaaagtggttatgcaagtgggcctgtgagctctcaacgtctaagccgtgcgcatgtgagacagcgataagctcgcgttctccagtctccagggccttatcattcctcacgctttccttcatcggctcgcaaagaaacgtggcgatcaaggaagacagcgaaggctccatcctcgtcgggggaggataattcgaatctcagcctgtgagtttactcagcacacctgtttaatctcttggtccttcagtttccacacctaggaagctggaacagcagcagcatccagcgccaggactggagtcatatacgaactctggcacctgggaggcgcgcgtcctacgtcagttccgctcgaccccacccyccccgcccccccgccttctccccacgcgcatgcgccgcgcagcggcgctttttacgacgcggcaggcgcggcgcgcttagttgccggagctgaacggcgcggagctggtctgaggcgagccgagccgagcgagcgcggcggtggggccgagaggacgcgcaggtggcggcgttgccatgtcgcacggtcacagccacggcgggggtggctgccgctgcgccgccgaacgggaggagccgcccgagcagcgcggcctggcctacggcctgtacctgcgcatcgacctggagcggctgcaatgccttaacgagagccgcgagggcagcggccgcggcgtcttcaagccgtgggaggagcggaccgaccgctccaaggtgggccgcctggggcttggggcgggcggggcagggtgcgtgtggggcctcgggccgtcggtctactcatttctgatgttaagaataacgacagcctggttgccaagcgcttttccgtgcctgtctcctgccagctctttgggaggcgagcagcgttgtctccccattttgcatatagggaaactgaggcctagagggaacggggacagttttgtcaagctacacagcctaacgctctattccagggctgtgtgggctagagaggatggtcgtgagggccgttggaccattggtgctaatggctgcctcatcatattacctggtgaagaygagcctagggagatgaaaggtggttcccatatagagcaaatgttctttacattgtggggtcgcaggcccctttgctatctgtttgaaagcagtggaccttcttctcagaaaaatgcacataaacacctgcctttcagttcacacttcagaaggctcttcgaccctggaaattcattcatgggctttttgttaagaaccttccagttgggtggcctgtggctgttatgacactggataagactggttagcttcaagttaataagtcttggaaaaccaagggagagtgactcttcccattgcaccccagttgtagagcagggtgggagatgcctgaaattgtaggctctcagcaaatatttgttgctttctcctcccccctccccatcccctccagtttgttgaaagtgatgcagatgaagagcttctgtttaatattccgtaagtatctccttggtgcctacctcaggctaaataggctgtacccagttgcctcagatggattcattcactggtgtcaagagcacacatttgcttctagaaatgggataaattactttggtgggtttgaggaggaaagcatcatagctttcttggtgcagactggaaacagatgtatttgtagaacaataactgagaaattgaggtagatttcttagaattgtagaatgctagaggtagacaggatcttagaaattatctagtacaagttgacagatgagtaaactgaagcccatacaggggaagggtcttgcccagggtcacacaactaaacaggtattcaaactcaggtttgacaaccttctcttttgcattctggcagatttacgggcaatgtcaagctcaaaggcatcattataatgggagaggatgatgactcacacccctctgagatgagactgtaagtggcaaaggcttaggccctcaaaggagctcctaattctctttttctggtaacattttattccagaatagtatcntttncttcttaccgggtttaatatttccccttttaaaatatcttggtcctgttctcattctgcattggaatacatatatttcttcctgaattaatgacttttttagattaagcatctttaggcccaacagcgtgtctcatatttcaaagtgcttactatgacatgattcattcagagagcattgtgtaaatgtcacttgttgatgactctgcagttttcttaataactagctgcagatctcatatgatctttatggattctaggggttagcttcaacatttttccttgctatttcatacagtaatgatcttatgtgttttgttgacatggaattgctccacctgactttgcgtggcatttagttagcaaagttgtgtatacctcttgcaacactgaatcttttgccaccagagctagtaccctttttgacaacttaccttattccagaacagccttcctaaaagaaggggaaaactgctttctgagtgctggagaaacatataagaagaactttacatttaaaaaattcagtccgggtgcagtagcttatctcacaaaaccaataaaagatgatatataggctgggcacagtggcttacacttgtaatcccagcactttgggaggctgaggcgggcggatcacctgaggttcgagaccagcctggccaacctggtaaaaccccgtctctactaaaaawacaaaaattagctgggcctggtggtgcgtgcctgtaatcccagctactagggagggtgaggcaggagaattgcttgaacctgggaggcggaggttgcagcgagccgagatctcgccactgcactccagcctggatgacagaatgagaccccatctcaaaagtaataataaaaacaaataaataaaaaattcaaatcctaaaggccgagcatggtggttcacacctgtaatcccagcactttgggatgccgagactggttaggagttcaagaccagcctgaccaagatgctgaaaccccgtctctactaaaaatacaaaaattagccgggcatggtggcacacgcctgtaatcccagctacttgggaggctgaggcaggagaatcgcttgaacccaggtggcagaggttgcagtgagccaggatcgtgccactgcactccagtctgggtgacagagcaagactccatctcaaaagaaaaaaataattcaaatcccagcactttgggaggccgaggcgggcggatcacttgaggccaggagttcaagatcatcctggtcaacatggcgaaaccctgtctctactaaaaatacaaaaattagctgggtgcggtggcacaggcctgtaatcctagctactggagaagctgaagcatgagaatcacttgaaccgcggaggtgcaggttgcagtgagccaagattgcaccactgcattccagcctgggcaacagagtgagactctgtctcaaaaaaaaaaaaaaaaattcatctgaaaaattgattaaaggacttccagagatttaagatatattatagttgagtattagaaacatgaatttgaaagcaaatccatgtatttaatcattttaaggaaataatacctttgatgcttttggagactcatttacttggaagttgatggactgacctgagaatattaggcatccatgctgcattgtgatttagagtgtgggatctggagtaaactgggttcaaataatggctgtaccacttgttagcttcatgactttgagaccttatcttctctatgcctggattttctatatctaacatgggaatggtaacagtgcatacatacctcataagattgtggagaggcttaaatgagataaaacatgtaaagagcttagattaggtctggaacacagtaagtgtccaattttgggtgaacagatacgaatacatagccctcagttctaagcacactacatatattatactttatcaaatgtaagatgtcattgattgtaaaatgtaccattatattcaattaatacagaaaaaatgctattgaactatgacatgtcattgacacatccagaaaaattagattgagagtattaaatcagggaagtttgaacacagatgaggtgttacatgttactaaagaattaccattcagccaggcgcagtggcttacacctataatcccagcactttgggaagccgaggcaggyggattacctgaggtcaggagttcaagaccagcctggccaacatggtgaaaccctgtctctactaaaaacacaagaattagccagtcatggtggcagtcgcctgtcatcccagctattcgggaggctgaggcaggagaatcacttgaacccgggaggcggaggttgcagtgagccaagattactccactgcactccaacatgtgtgacagtgcaagactctgtctcaaaagaaaaaaaaaaaagaattaccactgggctgggcacagtggctcatgcctcaatcccagcactttggggaggccgaggcgaaaggatcacttgagcctaggaattaaaggttatggtgaattaagatcgtaagatcatatactggaccccagcctgggcaacagagcaaggcttaaaaaaaaattatttatatagtttgagatagggccttactttgtcacctaggctggagtgcagtagtgtgatcatagctcactgcagcctcgacctcctcagttcaagcaatcctcccaccgcagcctcccaagcagctgggaatacagacgtgtgccaccacgcccagctaatttatgtatttttttgcagagatggggttttgttatgttgcccaggctggtcttgaactcctgggatcaagcaggctgcccacctcagcctcccagtgtgctgagattacaggagctagccactgcacccagccaaaaaaaaatttaaaaaagtgaattgctgttaattttgttatctgttgatattgtcaattattgtaaaatggtattaaatatatgtattttattttattttattttatttttgagacagagtctcactgtgtcgcccaggctggagtgcagtggcgcgatctcggctcactgcaagctccgcctcctgggttcacgccattctcccatctcagcctcctgagtagcggggactacaggtgcccgccaccatgtctggctaattttttgtattttttagtagagatagagtttcactgtgttagcaaggatggtctcgatctcctgaccttgtgatccacccacctcagcctcccgaagtgctgggatcacaggcacatgtgtgtatatatatatgtatatctacatatatacgcatatatatatacacatatatgtgtatatatacatatatacgcatatatatatacacatatatgtgtatatatacatatatacgcatatatacacatatatatgcgtatatatacgtgtgtgtgtgtgtgtgtgtgtgtattttttgtttttttaagacggcgttctgctctgttgcctaggcttgagtgcagtggcccaatcttggctcactgcaacctccgcctcctggggtcaagcgattctcttgcttcagcctcctgagtagctgggattacaggtacacaccaccaggcctggctaattttttttttatttttagtagagacagggtttcgccatgttgaccaggcagctctcgaactcctgacctcaagtgatccgcctgcctccgcctcccaaagtgctgggattacaggcgtgagccaccacgcctggcccatactggaatatttataggtgaaatgatgtgtctgggattgctttaaaatattgagcttaagcaaaatcaggctgataggcaagatcaacaaaatgttgatcatcgaagatgagtgaaaagtatgtggagattcattatgtaatctctgcttttgtgtaagtttgaacttttccatagtaaagttttttcaatatatgcgttacttagaatcgattcaatttcatctccataccaaccgtgtggaatatgtactattaccattcccattttacagatgaggaaacagaggttaaatcaggtgcccaaatttactcagctggtaagtgacagagccaggcttgaatcctagaaagtctagctctagattttaactacagcgctatactgcttctcattatgccgctcataaatgtttactattattattattctgtggtgcatcattcttagaaacactttgaagtaaacatttgctttcttttttttttttttttttttttttgagacggagtctcgctctgttgcccaggctggagtgcagtggcgccatctcggctcactccaagttccgcttcccaggttcatgccattctcctgcctcagcctcccaagtagctgggactacaggcgcctgccaccacgcccggstaattttttgtatttttagtagagacggggtttcaccgtgttagccaggatggtctccatctcctgacctcatgatctgcccgcctcggcctcccaaagtgctgggattacaggtgtgagccactgcgcccggsggctttcttaaattacatgcattttgccccagctaatatcgaggcctcttctgtgtgggtgtgtcaataaaacaccctggaattggtggggacatgtggcttagtctttgggaatttgtgggttatagagacagctgctttttagattactctttgaaaaacattttcttctctagcagtttactttttatttattctgagacagagtctctctgtcacccaggctggagtacagtggcgtgatcttggctcattgcaccctctctagcggtttggatgtgagattgcagtcttttgtgatctttcaaaatggaaatcctcatgttataaatgttttaagaactgtaaggtgactgagtgtatggcgtggtttttggacacaaaaaaatgcttgagcattgggttacctgatcttttatctcttaactgtgtgtaatatgtttctgccaaagtatgtatttttcccatgagtaagctgttttatttaataacatcctcagtttggtctgaatgtgctgagttgtttattttctccatgcatttgctgcatgtgacctagtttgagccgtctctttgtgtattgcttctcatgtgatattaacccactcaaagatgccatggggttatgttgcagatctcagctctttttttgttggattaaagatatttgtaggctagacgcggtggctcatgcctgtaattccagcactttcggagaccgacgtaggcggatcacctgaggttgggagttagagaccagcattgccaacatggtgaaaccctgtctttactaaaagtaccaaaatttgccgggcatggtggcgtacgcctgtagtcccagctactcaggaggctgaggcatgagagtcacttgaaccygggaggtggaggttgcagtgagctgagattgtaccattgcactccagcctgggtgacacagtgagactctgtctcaaaaaaaaaaaaaaaaaagatatttggagatacttgtataaaatgtcatttctaaaatatgacccccaaattcagtctcctattgatagaaccaaagccatttaagcagtcagtagaaaattttgaaaacctgaaacgtgataatgcacatttcttgacttttctttcctttcctttctcaggtacaagaatattccacagatgtcctttgatgatacagaaagggagccagatcagacctttagtctgaaccgggatcttacaggagaattagagtatgctacaaagtaagcactgggcctgtcttccattctctatggcttcttatagggcttgccatttatttttggccagtctcctgctctcttagcattggaaatgagttaaaacagtggaggagacttgatctttggcttggtcagtttttggcagagattcagtgcaagccacagacttgttaacttgcaagcaattggcagatctgaatgaactcctagggtggttttaggaaagatgtgtctcccattagtttaggttaacactaaatgtgctttagaatccctgctgggttatgcagcatttctcattcctgttccttgagggcaggagcagtgtttatccctactgccttggacaggatctggcaggtgctcagtaaatggtcattgaattaattgcctgtccaaaggagaaggaagaactcaggagctctgmctttgcctggcttttacaagctggagctgaattgttgtttcacatggtggtgagatactcattgaactataattcataccttctttccctattcctgtcatcctctagaatttctcgtttttcaaatgtctatcatctctcaattcatatttcaaaaaacttcggagcagatacgacaaaggtcttttatattggcctgagaggagagtggactgaggtaagatggggttggaaaggttttcccctcatgtctacatatctgcacactgtggtgatgggagcttccagggaagggaaaagagcaagtgtcataattactcccagtttattatttttcttggttttatcagtataaacttttcgtctcatttgagaaactacaggtatttttaagggggttgaaactgttatttttatataaataatatatataatatatatatatatatctcagctcactgcgacctccgcctcccaggttcaagtgattctcctgcctcagccccccaagtagctgggattacaggtgcccactcccacgcctggctaatttttttgtatttttagtagagacagggtttcaccatgttggccaggctggtctcgaactcctgacctcaggtgatctgcccatctcagcctcccaaaatgttgggattacaggtgtgagccaccttgcccagcctgaaattgtcatttatattaattcacagttttctactttcaaatgctttcattgagtatttttgataatcttttctattcatgaaccagggataagataataccatagacaagttcctattctcatggtacccccattatagtagggagactgaatcttcaaagttacagggtgaatcaatgataatgatctttgcagctttctggagttaaaaagtatcaaaattgggagatattagatgatgacatctaagtattaaaataaggagatattaaatgatgactcctagaaatgaacctgaataaggactaccgcaatgtgtgtggtgtgggaaaggacagttcttttaatggctggctgacccagcctcaattttcttgcagcttcgccgacacgaggtgaccatctgcaattacgaakcatctgccaacccagcagaccayagggtccatcaggttaccccacagacacactttatttcctaagggctggccaaggctcccatagaggcgctgtgtcagtgaagatgtacgactacctgttgggaaggacaaagggatgaggctccagagagagttggctgccacagcctctgccaagctttgtctttggggcttgctgcagaaacctggcctacggaagatacgacaccactgggagggttgtgtaggtgccaggggaccatcgtggttctctagggcgctgtggaaattgggtcttgggctgggtggcatctggcagtcatggrtaacacttgcttttccagttaatgtggccatgtgattccaagtgtcatgttgctttgtggcaagattgttgtgtgacttgtttttttgtttttgtttttgtttttttaaaggaaactatttgtgggctataggaaactttctgatgcctccggattgtgttagtagtagccatcaggagggtctccaactaaaacacttgttcctgcttgctcctttcccctctcattgttcagcattcttgtcaagttgcccagcttggagttgtctgtcacgcacatgtgtcctgtggttatagctagaaggacaggagtctcctgctgatgcgtgatagcttaagcttggggagaaggtcttttccactgcctagctaagcagtctggggagagcatggggatcatttctatgtgtgtgggtaatctggtcagtaagattgagacttagttaagattccccttggaaattccttaatgtttattagcttctaactagtgttgtaagtccgatgccagaatttggagatttgagttcttcttttcatggcttttattcactgtgactaataagcttcctaataaatccttgccagacttaatgtttgtattttcttttgagttcttgatagccactgatgcaactttcatttcatggggaactgtactgaactttgaaattttttgttgttgttttggactaggtagattataggaagtgccacaattaaatcaagactggagccgggcgcggtggctcacgcctgtaatcccagcactttgggaggccgaggtgggcggatcacgaggtcaggagatcgagaccacggtgaaaccgtctctaccaaaaatacaaaaaattagccrggtgcggtggcgggagcctgtagtcccagctactcaggaggctgaggcaggagaatggcatgaacccgggaagcggagcttgcagtgacctgagattgcaccactgcactccagcctgggtgacagagtgagactccgtctcaaaaaaaaaaaaaaaaaaaatcaagactggatcagtttctccaggaatggtcaagcttaattttgtacagtaggccaaaaacactcctacacccatatatagtaaagaagaaggtggggttgaaaacctgtatttcacagaaattaactgggcatggtggcgtgcacctgtagtcccagccacttgggaggctgaggtgggaggatcactggagcccaggaggtcgaggctacagtaagccatgattgcgccactgcaccccagcctgaggcaacagagtgagaccttgtctcaaaacaacaacaacaaaaccctatatttcattttgcacaaaaggaagtgatttgtagaatgacatttacaaaaataagggagaacagattttggagctcatcagaagaaatgagggtgaggaaagtaattgagcagctcatgtggtctccaggtagaccaaagactttggacttaaattttgaaagtcagtttagcaattgaagagaatgtaagtatctaaaaaggggatttgatatggtcagtattctctcccttgcagaaaacaggaacaggtaataaagggaattagtgttgaatctgatccttttgggagaattcctctgaggcattggcccatgctgttgtttggaggatatagccactgtttctccagcctgtcctaggaaaggtctgctaccaccaaaccttgttggccctcaaaatttctaaaatgcagcctgaaataaaccagaatgcaaatgctgttcttgaaaagcatgaagggtcctattcactcagccacagcctctttatttcagttggatcattttttggagttaaaagaagggctatgtttaaatttggagtagggggaaaaataaagttaaaaatcttagagcagactagcccttcactaattccactaattaaagcattaatcacagctcctgggactgagcctctgaatttgaagcttcactctgaagaatttgttttaagtgtcatggtgtctcaggtgatcgaggttgcaggaggaactgttcattcttccataagtggggacattaccctccattttcttttgacattcagtcctgggtccttggcttgtggtggtcccataggctcaaaggtttcctgccccgaatcctggtattgtaggctccctgacctgttgagtacttaggaccaaagtgcctctgggcctgggggaaagtgctttgttgagcttccaactttgtactgttttctttttcttttctttcttttttttttttttttttttttgagacagagtctcgctttgttgcccaggctggagtgtagtggcactatcttggctcactgcaagctccgcctcccgggttcacgccattctcctgcctcagcctccccccgagtagctaggactacaggcgcccgccacagcgccaggctaattttttgtatttttagtagagacagggtttcaccgtgttagccaggatggtctcgatctcctgacctcgtgatccgcccgcctcagcctcccaaagtgctgggattacaggagtgagccaccgcgcctggctgtactgttttctttctgttcaaagaaaacactagtataggttaggctgggagagtgagtcctaagcggctgagggtcaagtgtgactcatttcctatttgcagatccccacacattctcagggacatgctccttcaactcagtttgcctgccttctgacttttctgtggtccctgatacctatttccacttcagcttgatggcagcgttttgtgcactgtctgcatgacattgcttgtgaagggcagcgctaacactgccagtgcctgtccagctctcctgatacggcctttgtatttttcctaggtccttttttgcgtgattaacacctcacgctgtgattttactgtataaaccatgttcacacaacctcatttaagcctaccaacaaagctgtgaaggaggcagggtggttattaccattttatatatcaggaagcagatccagagaggcagaatttaaatggaatcccgaggttgctgtttacatgccttccttgagcctcagtttccccatcttcaaggctggagaactagatgatctgtaaggtctcttcggttcagagtgtgtcattccattcatgatcctggaatagggcatgaaagccagtggcagamacccgaggccttaagaggtgtgtcccatgaggatgggaaggtggtaaagtttatgcaaacaatagtgtgagggatgcctctccttccggtcggccctcctccaggaggcgcatgggtggtggtagcaagtgggagtcttgggtgccctgtctcgaatctacaaggtgggagcgggtgagaacccagcgactgcgcggctgaatgacagggagtagccccgccgcctccaacatggcagcttctatccagcgaagccgggtccccgcttcckggttccgtactgtcggccaggctacttccggcagcgcgatggctgggttcccgggactcgaacggaagttccggcgggggcggccgagggggaagagtgtgtctgcgggagaaagaggagaatcgcccaagcggcctcggaagtcccagggagtggaggtacccagccggcggctgcggaggatgggcgtgtagggggaggtcggcctcgggagggtcccggagagcggggagggggaaccgtgatggggggratgggggtggggagtgaggtgcgaaggcgctgtccagtcttggggacttcgggagtggagcggggctaggcaagggggtgtctgagtataaagagacagacttcagggtcggaaatagaagagcccattgtggggcgggggcttccccagagtcaaaggtacaaagctttattgtgggcaggtgggagtcctgggtcagggtagaaaatttcactgggtagggtgacctttggtcagaacagaagttcccattgtggggagcgggagatcctgggtcagggtggaagttctcaaggtgtatagagagagacaggtcagggggaaggcacccctccgaggagggagcctgggcgggaggtgcaagtccccacggtggagaaggaagggaatcgcagctcagggcaggaggtgcattccccatgggaagaggaaccccgggtcacaggtgaacgatcccattgtggggagctgccctcaggggtcagagatggaaggtgaggccagttgggaggggtgggcaggcacttgaggcaggtagtggaagcttccggcgagtttggaggacgccgaggatggggaggggccagccagcctgacattcttttgtgtgtttgggagtcccagagcgtggtcaagccagggctcgtttgcagtcagtggcagcagcagcaggtagctccgtttanggggggcgtggagcaccagtttgggggtgggtggagttcttacgctttctggggacatgggcagccccctgggggtctgggaatggatgggccagaaactgctgtgaaggctggatgggggctgggtggggggaggttgagatgggggttggaggcggcactgagtaggggatggaagctcctttccctggcacttttctctccatttcccatagggcccggagttggggaggcagggacccagggatgattggagaggagggggaaggcactcacccctgaggagttagagggggaatgaagcaggcgtgccgctgcctcccctctgccccctgccctacagtccctatgccctgcctctgcctgtctccagcaagctcaggtcctgtggttgggccagaaccagagacacatgttctgggccactagggaggctgtctctgcctttcagccctggaactgaggcagacttcttctcctgtgccctgggacttcttgcttgactattctttgtgcccaggacagaacctgggtgctgtgtggggctgakggcctggtggcctcttgggccaggagtgtgtcctgtgcctggttttgctcttgacygccgccccgatgtatgcaggcccccgccgtggagccgtgtggtgtatgtgtggtaacaccatgtctgtgcccctgctcaccgatgctgccaccgtgtctggagctgagcgggaaacggccgcrgtaagggtcccctttcacccacggccagacactgtgggagcagctggaggaccggctggagggggtgtgggaaaatggaggtggcagtgatgagcagggagtatcctgaggccagcaggctcggggtagtaamctgtttggctgctacctgggttcccccaggtccttgggggtgggggaggggtgggcagaagttggaggacctagggkaagccttcctgtytccccatttcccatccttttccaggttatttttttacatggacttggagacacagggtaagtgactgaggaggggtgctccttaaggaggggtcctggcccagcagcggactggagaggccttctcttcctaccacatcggagccttttctccygtccctcctacaggcacagctgggctgacgccctctccaccatccggctccctcacgtcaagtacatctgtccccatgcgtgagtgtcaccccagcaagggaggggctgaggctggggatcatctgggggtggtcctgtcatcccaggcctgttctctcctgtcagttgcatcctggggcttgggctcagggcagtcagaagtggcattttcagcctgagctcctgtggagcccccaggagtggggtccagcaccagcccccagccctagggcctcctagacctgagctctcctagaacccacacctccctttgccccttccccaagtactcaccgactacctgggaccccgtcacaccaagcgctgggctctgcttctccattactggcgctttgccccaaccacagcctccagccccacgtggcaggttgcctggcaacaccttaaacacaggccctgcctgctgggaggggccaccaggggcggcgcggccccactccgggctctgagctctggcctcctcattcctcctgagcatgatgggccctctggctctctttccccaggcctaggatccctgtgaccctcaacatgaagatggtgatgccctcctggtgagtttgggagtgggggtgggcagggggacgaggacacttgggctgagggagccacagggggctggctggggttttctatagctgccagtgcctctactcccaaggtttgacctgatggggctgagtccagatgccccagaggacgaggctggcatcaagaaggcagcagagaacagtaagaccccagcccctcctccacatcctccttcccctgccccccaggaaagcgctgggcggttcctcagcctagctcccttattgggccccttggcagcttccctctacccactcatgccccctcccccagtcaaggccttgattgagcatgaaatgaagaacgggatccctgccaatcgaatcgtcctgggaggcttttcacaggtgaggggagaggggtgggggggtagggggtaggggtggccggtgagtgagctgtgccmtcatgacccctctctctcctccctccagggcggggccctgtccctctacacggccctcacctgcccccaccctctggctggcatcgtggcgttgagctgctggctgcctctgcaccgggccttcccccaggtgaatgtccccactgacccccccgccctttgtgtctgcatcctcgtggcttggggactgctgcagcactagctttgccctgagtcctgtccggcctccaggcagctaatggcagtgccaaggacctggccatactccagtgccatggggagctggaccccatggtgcccgtacggtttggggccctgacggctgagaagctccggtctgttgtcacacctgccagggtccagttcaagacatacccgggtgtcatgcacagctcctgtcctcaggtcagtggggggaccatttcccactcccacttctctgcctccagccaggtgcctctcgtgatcccctcttaatcccctcaggagatggcagctgtgaaggaatttcttgagaagctgctgcctcctgtctaactagtcgctggccccagtgcagtaccccagctcatgggggactcagcaagcaagcgtggcaccatcttggatctgagccggtcgagcccctgtcccyaccyttcctgacctgtccttttcccacaggcctctgggggcaggtggcaaggcctggcygggccttccttcctggccttagccacctggctctgtctgcagcaggggcaggctgctttcttatccatttccctggaggcgggcccccctggcagcagtattggaggggctacaggcagctggagaaaggggcccagccgctgacccactcactcaggacctcactcactagccccgctttgggccccctcctgtgacctcagggtttggcccatggggcccccccaggcccctgccccaactgattctgcccagataatcgtgtctcctgcctccactcagctgcttctcagtcatgaatgtggccatggccccggggtccccttgctgctgtgggctccctgtccctgggcaggagtgctggtgaggaggtggagccttttgaggggggccttccctcagctgtttccccacactggggggctgggccctgcctccccgttaccctccttccctgcaggcctggagcctgtagggctggactgaggttcaggtctccccccagctgtctcacccccactttgtccccactctagagcagggaggcagtgggggaggagttgtgtctygtcttctgtctccatgtggtttttgggtgtttttcttsttgtgtcctggattccgataaaattaaagaaattgcttcctcaacgctcaggcctggctgattctattccaggggtggatagtgaccatctgtgagaacctgccccagtgtaagaaaacttgtttttatttttaaatactttggaaagctctttcagagcaatataaatgagtgcctgggaggakgaggttttgtgccaragccttgccccctcactcactcttgggggtcctgatgaactcttggaccctgtggaagataagagttaragacctmggcctcctggtcagtggagcccttggcctcatgcctggtgggctaagcgggcccagctggggtttgaggtaggggaggccttggyttggccccagcagctccagggccctgagttcctgccagaggctggagagcaggcagctgctgcttttcctggtccttggtaggggagggtcctcaggcttgcgtgccaaagcctgaaggattctgcttctgccagcgccagagatcctmacctgcaacacggcgaggtgtgtgctcagggcccacggtggaatgcagagcctcccccaccccacagcccgccctgggtgggcatgcccagatctgatttagcccctccctggcccctaactgcaggggtcaggccagcactcacacatcctgtccagccctaaggctgctgtccacccmagctcctcttgggccargctkgggttggcgtaacaggctgccacatcaccttcccgccgkgcmaccaccttgtacgggatctgcaagacaggaggtagttggagcttakctgagccggccctggcccagctgctggccaggtctttaagaagcagaagtgcagagcagcggctggcccgcaggcaccgggtgctaggcaggctgaggagactgggcagtgccaggtaccctccagagaggtgagtgggaagggccaaagctgctctgttgctgagagctgggtggggtgaggtgggtgaggtgggtggggygggggggcctaccttcttyccagargccttctccatarcctggaccatytgcagcactgaatagcctgtgcccgtgcccagkttgtagatctggcccacggagaacagggtttatggagcgggctggactgaccacgcctctgggccgctctgcctggatctggtccctcccctccctcacttctcccttctcttcctacccggcagccacactgttctttcagcttccttaaggctgcaatgtggcccttggccagatccacgacatggatgtaatcccggacacctgcagagaagggagtgtgttggatggggagtctgttccccctgactctccttcctggctcccactcctaggtccccctsgtcctaggctcacctgtgscatcctctgtgtmatagtcattgscaaagacattcagggcctcmcgtcgcccgatcgccamctggaggtggagatcaggtcagttcgtcccagatcccaggcaccagctttaaccccagggccactcctctgtcccttcccttttgccttacctgggagacataaggcatgaggttgttgggtatgccctggggatcctcaccaatgcagccagaggcatgggcacctgtggggttgaaatagcgcagcagcactgcgttccaagtctgtgggatgtgggtcaggtggtgaggccagaggcacaggcagcgtgtcccagctgaacccagagccctcctcatgcctattctgtttttttgagatggagtctcactatggcccaggctggagtgtagtggcctgatttggctcacttcaacctctgccttccaggttcaagcaattcttgtgcctcagcctcccgaatagctgggaccacaggcacacaccaccatggccggctaatgtttgtatttttagtagagatgggggttttaccatgttgtccaggctggtcttgaactcctgacctcaggtgatctgcccacctgggcctcccaaagtgctgagattacaggtatgagccactgcgcccggccagttgtctatttattatctttagaaacaagcaggggatggggccctccactgcaactgcctgagccttagcttcctccttagtgggggtgttcggaatcccacccctgggctcagggtgggccctgaggagtccatcgatcagtggagccagggcactgtcaagggggccctcaccttgtctgcctggcacaggtcccggatcatttcctcgatgaagaacttggacttgccgtaagggttggtacaaccacccgtggggtgggcctcatcaaggggcaggtrctgggggttcccgtacacagtggctgagctgctgaacaccaggttcttcaccccgtgggccttcatgatctggccgtggagagatggcatcagtgacctctgcctcacacattactcccaccctgttactcctccacaggagaatggggctgaggtgatgagcactctcatttacagatggggaaactgagactgggaggtaaagacatgagtccaggatgatacagcttgggctctgtgtttggcactgcctgccaggctggggtccagctggacaccctcctagtgtctgtgccctgtcccatgcctctcacctccagaagctggatggtcccggtcaggttaactctgtaataatccagaggcttctgcaccgactcgcccacggccttgagccccgcaaagtggatgaccgccataaagctgtactgcaggggtgacatggccagaggttgctctactggttttagtccttggcaatgccctcagcctgcctgcctgcactcacctttttttttttttttgacagtctcgctctgttgtccaggctggagtacagtggtgccatctcagctcaccgcaacctccacctcccaggctcaagccatcctcccatgccagcctcccgagtagctgggaccacaggtatgggctaccatgcccagctaatttttgtatttttctgtagagatggggtttcactgtgttgagcaggctggtcttgaacacctgggctcaagtgatctcctcacctcggccttccaaagtgctggaattacaggcgtgagccaccgtgcccagcctgcacccacctttttgaagagacgctgtagggctccctggtccaaaatgtccatctcctcaaactccacagagcggcctgtcagctcctggacccgccgcaggctctcaggcagggagccccctcctggtagggtacatgtaggccacatcatcacgacatggggtgctgtgttcccagggactagccagacacacattccccscccggtggtggaggtggaacccagggttttgcttctgccatcccctcaagtagccccagccccactgccccgctcaccacggaaggcattatggaagttatcgatgaccacaggcaagtagccagcctccagcagctccagcaccgtgtggctgccaatgtagccagccccacctgttaccagcaccttctctgccatggcacctggcccaggatacagagtctcagaggtggctgaggctgcctgctcagagcttccttcccactggaatcctgccccctaagctcgctttggaaggaggcggcagtgtgccctaggtaccagactggctcagaagtcagccctggggcaagtctgggtaccatcactttctggccttaggctttggaaattaattagcctcttggcctcagtttctatctctgtaaaacagagctaataattgtataaacttcatgaggcagcgtgagggttcagtgaggtgatcttaagggcccgccacagcagagctggggagacctgacacacaggcaccttattttctagttccacttgccttggagttggaaaagatggaatctgaggatccacacttctttgtccaaggtgactgaggactggagagtcctgggcagaaggaaaatggcagcacgattgggactccagggtygcaggaargggttctgtctgctcagacccaggcttgtccaatgcctccgccttcgctaggtgtaaactggctcctgggcgcagtgactaatacctcctgctctaggcggcccccaccccctttccctcaagggtcagctgggaggaagcaggaaatagatcacatggcctcaagggtgaggtcctttgccaggcaggctgaggccagctcaggggcaaccacaccgtggttggtcctggagggggccccaccccaacccccgctcagcctctgcccatgccagggccagcccggtcactcctggctcaragttaggaatcccgcccaacttaggctactctgggtgggccgtgtagacgtggacttggccaggtgcgcacctccaccctgaacaaactctgcgggtagtacggggaggaagccccagacactgaggcctttcattcccagcgaccgggcccgctgccgccttcctccacgctgcctctatccccttctgggctcacgcagctccaacccacttgaccaagagccctctgcgtgccaggctccgtaccaggcacttttgcatgattttcctgaattcccccagcatctcggtgagacaggtgttatcactggcactttacagatacagatactagggccagagaggtgaaacagttgcccttcggtcccacagctggcgacagcgggctggaatctggatcgccaggctcgcagcccggccctctccccaggcggctcgcccttcccccaccgctgcccgctggactctgcccgccgcgccgaagccgcccccgcccccgccccgcgcctggcgcggaccccgaaagtggtcgcagagaggccctgggaagcacgaaagctggtctgaggccggctgcgcccccgacagcggagtgaccttgctcagccgtcgcccactcggttttcccagtctgtctgttggagggaaggggagctaggccgtgggcatacgagggcggctgggtctcaggctgggctttgggctgtagcgcggagcggggccgagctaggagtcctcaggccggcaatgaatgaaccccggccgccccagcccgggcagcggggaactgggacaaagggggcgggcctgccctggagggacgctgccaggaacacgacccgcccctcggaaactccctcgctccccgcggactccccggcccctcgcgagcccacccggcccttcattccgtctcccgaacctgctcgggttcccgcgccccacgcttgctgcagaggcaccgcctcctacgcccgagccgcgggccctttaagtgctgacggcccactcmggccccgaccccgcccctccacgcccccaaggaaacatgtcactcgggttacggccactacggggagggcgggaggacaaaaggcctccgcgctgtgacgaagactgcgcagcgcgcgcccgcggaaggcggaagtgggcggtgccaccccgcgagaggcgccgccggcgccaggtcccagtagcgggtgggtccttgccggtgccccgggtccccgcgctagctcgtcccaacccctggaagagggctgcgcttccgagggggcagggggcagagggtagggggcccacgcctccgccccactctgacccgcaggttttcagacttgccggtgtgtgccaaaccatgaattcaaaatcttgaactacscgatcccacgggactaaggcaggagggggtcgcagggggcctggtgctggaagtccagtttgcaaataaaccaaggagctggaggaagctgtcaggccacactagcggttccagcgctcttggctctcagcccccacctgccgggaagggtcggtctgcactctgccttccacgacggcaggttagaaaatgattgtttgtttmcaatgaaaagtagtagagctagagaataatatgcacaaaatgtgacatcctgcgtgatgaaaccagagcaaaggagccctaaatgcaggagcgcacaggtgtccgcgcagccgggaatcagccagcgcctgcccgcagagtccagggaaccgacaggtgagcgctcccgggcccgggagcgccagggagaggccgggccaccgaggcccaaagcagcaagtgtgtcctcaggggagcttgtgcaatagccccagtcacagaggcaaagctcagaaacaaccccgtcgggtgttctggccagcaactgccgcaagcagcctcctgagtaagcccaaaaccactgatttccagtcactatggatttggggctcaggtggggaaacagggaggaaatccaaagattaataaactagttcatagtctccattttcctctcagagtgcaacatggtaaagtattttactcccccacgcgcatgtatacacacagctgcacaaccgaatgctggaattatgatgtgccattcaacctttaattacataagctgttttcaaaaatcacattcagcgtggagattttccaragatgctggagttggcagayggccaccacgtagctytccactttccacaaatggcctctgccagcttgggaagaacctccatgacctgtgtcctgagaagtcagagagcaagggccccacggccatggcagggtggagccgtgtaragggtggccaggtggccagctcgcggattccatccagagaggagactcaaggatcatgctaagtagggaacggggttcccacacgtcctcaggcattcaactcctgggccagggtccgtaacaaagggagacttcagccctcaaagcctctcactcctcaggtctgggcaggaggtccttctgccaagcagctcctcctgcccttcgcctgctttctgccaggagagacctctgtgtagagctggctatgaggtacctgcaccatttaacctattctcatttccatgtccccatccatgaatcatctgtgtgtgcccctatttccacatcatccccagggcttcaggtgggcaaggggctcagagtttacaggtagcctgagccactttggagctagtttttctgttcagggcttgacagataaagtttccagcttccagaagcttctggagattcacaccctttgagaaacaagttagaggatgcggtaagtcatggtatgccctcaacaccagggaaaacatcagcatggrcagacaactgtgatactgaaaagtaaaggtgaagataaacaggctttttccttgacagcrgggcaccagctgcctgtgagctcctgtctgtctggcacctgggttattcctctgactccccctcatgtaagatgcccaatctctgtcatggtttgtagtgccactaccagggcacagatcttatcagtcttgttcagtactccctcttcagggcccagcacagggcctggcccacagaggtaaaaaactgatattcaagtgacaattgtgaggcagagagkgagggataaaaacaccaactgaaagggccagacagaaaccctctgttcatacagtagctcatatttgctgaagtgcactctgtgctcagctctgtgataagcattctacataacttttctttctttttttttttggagacagagtttgctcttgtcgcccaggctggagtgcaatggcacgctctcagctcactgcaacctctgcctcccgggttcaagtgattctcctgcctcagcctcccgagtagctggggttacaggtgtgtgccaccacacccagctaatttttcttttcttttttttgagagggagtctcactgtgtcgccaggctggagtacagtggcgtgatcttggctcactgcaacctctgactcctgggttcaagcaattctcctgcctcagtctcccgagtagctgggattacaggtgcgtgccaccacacccagctaatttttgtatttttagtagagatggggtttcaccatgtcggccaagctggtctcgaactcctgacctcaggtgatctgcccaccctggcctcccaaagtgctgggattacgggcgtgagccaccgtgcccagcaatttttctattgttagtggagacagtgtttcaccatattggccaggctggtctcaaactcttgacctcaggtgatccacccgccttggcttcccaaagtgctgggattacaggcgtgcgcctggccctctacgtacgttttcttacttaatcctcacaatggctccatgagatggatggcattattattcccatttcttaggttcagagagatgaaataatttgtctgaggtctcatagcctgggagtggcaggagtaggctttaaacccagttccatctgatctttaagcacagatgctattctgcttccgtcccgccactgagggccctggtggactctggcggatccctggtgagctgtctaacgctactgtcctcattttacagagaacaaaacaaagccaagagagaactgactcatttcaggtcatgaacctgacccttcccagggccccttccatgttcctggtgtctcctaggamtgaactgtcaaagtcaccctgacactccagccttcttatgcccatgcgtgtggcctcactcaaccctactctcacaaacattaaaatattagatcaaatatccataatccccaacacccttcccctcttttgttttgttttgaagagatagggtcttgctgtttcacccaggctggagtacactggcaggatcatagctcactgcagcctcaaactcctgggctcaagtgaccctcctgcctcagcctcccaaagtgctgagattacaggcatgagccactgcgcctggctaaccctttccctctttactcctcagcaccttaacaaccccaaatacccccatccacttttgttctcagcttcaggccccctggtcagttcggggctgtcgccaccagggggtgggtgggcttaccgtgtgaatgcccaagccctctagcatgtagaccaggtcttctgtggccaagtttcctgatgccccctgtgcgtagggacagcctccaagtcctgccacagaagagtccacgacactcactcccatctagaaacataaggatggtgaaacacagttgttgctggggacaagaggccacagagatgagccttgcaaacctcccaatcgtctgttgcctgaaattctagagtcattctttgctttggcttatgattctgttgacatgacaatcccacagaaagagacagtgcttctccttttagtttctgttaaactgtttcctctgccagcagtatctttcctttcatggtgaactctcattctttagnttccagtctgaaagccacctgctcagggagaccttttctgatcaccagcctaaccccctcccactgctgagatttcagacccctgttgtttactgtgattcatttattaccccccccccacttaccccccaccacctccaggctactctcactcagtcagggccttgccacacgagggccacatcccatcttcccaggtcagtcacctcccactatcccaaatgactatttcactttctcctctcttcttaaacctctatcacccccttccccatcctcattctcatctgctgctttatggaaatggatgcaatcaagagatgtctccattgattcccaccatcacatctacccacctgcctacatctgggcctacagacccactgtccctcatgctgcctgagatggacccygagctcctagccaaggccaacccctccaccttggcgtgaggcccattcccacctgcttcaggatgtgctccagtaagtctctccctctctgctgcaacctgttactcccctccactgggtcatcttcacacagcctgcgatctctcccatcttttacaaacctttttggaaccctctaacctccaatttctttccccccattcaaagcaaagtccctcaaaagagctgttcccatttaacatctaccattctcatttgaacccattcgaaacaggtttgcgtccccacaactcctccactgaaacagctctagtcaaggccactggtggcctccatgtagctaagtacaaaggtcaagtctcttcatctttgcacttgactagccgcatcatcttggacaccttctccatgtggcttccagggctccacatcccttggttttcctcctagtgctctagcctctcctgaggcctcgatccagtctttgctggctcttcctcacctccctgatctcggttggagcccttactgctcattcctcagacagcttctctatctccactcactcccagttaactgcacccaggttaacacacctgcctatagatgtctcgagcttcacagatcagaacacraactgctgagatccggtcacgcacctctgccctccaggcctccttgccatgtctctcacctggattgctgtaggctccaaactggttcttctctctacagtgtattctctacacagcacccagaggagcctcttttttttttttgataagaagtctcactctgttgcctaggctggagtgcactggcgccatctcagctcactgcaaatcactgcaacctccacctcccgggctcaagtgattctcatgcctcagcctcgcaaatagctgggattacaggctcacgccaccacgcccagctaatttttatatttttagttgagacagggtttcaccatgttggccaggctggtctcaaaactcctgacctcaagtgatccacctgcctcagcctcccaaagtgctgggattacaggtgtgagccactgtgcccagccgaggagcctctcaaacggaacatttcagatcatctccctcccygcccctgctcaagactctctgttagcttcccagctcagtctgaaagagtcaaagtcctacaaggcccccgatctggccttcctctaaccctgacatctctgcccccctctcctcagtcacactgctcccgccacatgcctcctcctgatccctgaacacagcaagcacactcctccctcagggctctgcgcctgctttcctgggtggggctcccttccctccccctccctgctagggatccgcagggctcactccctcgcttccctcaggtctctctcaaatgctaccttctgagtgaggccactctacagaaaggcctggcactgccttaacctgcttcattttttctccacagtgtttatgaacacctggcctgctgtatgtttgtttatttattatctgtctcatagtactagagtgtcagcctcatgagggcagagactctgttttggtcacagctgaatccttaatgctgagaacagtgcctagcacactaggcaccgttaggttaggttttaataggtgaataaatggtcttacaatgtgctatttacacgcctgtaatcttccatctgtcttccccacccaccataacatgagctcccagagggcagggattgggtcttgttaccattgtctaagtcagcacttaacctggcacatcgatccatatttccgaagtaactgatggaagagggaggtcagaggaagctactgccagacgtcacacagctcaacctgttccctgataaattttcaaaaaggggattctgagatatcactgccatgaaacagagaagcacagaggagcaggagtgtcctgagcrtgatcaggatgaagttttgcctcagactcacctcagctgtgcagaattcccctttacctgcctggcaaggcataggagaggaagtcactcttcctgtctgcctggctgggaaacgcatgagctgaaggaaagcccaggaaccagggcagggtatcacagtaagctgaaaaatgaggagaccacagaactacgaaccttaaccttgacagccacaactctgaggaaaccgacccagaacataacagactcacctggcttagacacgaacctctaggggataattgagaggaaaaaaaaagtggctggaactgccatcactatcctagagatggaaggttaggccaatgctacagcaaggtagctgtggtcagacactaagaatgctccttctatctggctgccagccaatggatctccattctggaccagcccacgagaagcaaacctcaaaggaaactaatctgaggtcttagctcaatctgtggggaacggcattaaagcctctccctctgagtgacctctgctagcttctctacctcctgcttcctcatctgcttctgctacacacccgcacactgaaaaccctgtatattgtatgagtcctccctgaaccccacatcagtcctgaggtgcaattctgcctagtcatctttcctcttccctcaacagcagcttactttatgttcttcaagcttcactgaggcctcttttgcaaatcctcccagatctcctcagctgggatggggcccctctaggcttcctgagccccatgcttcctcccttcatggcatctgtcataatgcagtgggattgccatgtaactcccttgactgtctccccaacacagagytgtacacttcacatctgggcagggtcaccatgactgtgtccaccattgccagcttggaacctggcatactggcatcagtaaatgtttgctgaaagaataaatgataacaagctgtcctgcccaccgtgacctttgggagaatgggcatatgcttttgattacctgcagggccatcaaggtgttggccagggcttgaccataggtgtcatggcagtggacagccagggcagccagaggcacttcctgcatgacagcagayagcatgtctttcatgatccctggggtgcccacaccaatggtgtcccccagggagatctcgtagcagcccattgagtagaacttcttggtgacctaaggaagcaagcaggcacttggaggatacagaatccaccagccaggggatccatgcactcagaagagggggcctttgcctgggcagaacacttctgggtatgacgcactcagttcctactggattacatgctcctcaccactccaactgggaatgatgatcctcaatctatgatcaggagactgaggcgtaaggggcagagccagccgctggagccagcccacagtcctgaagctccaacccccgtgctttcctccctacctgtgcccctcagacttcagtctcacttacggctgtcacatcatactgtcagacccaggtgctggaatcagtgaagttgattccttccatgtcgttttatcctcagcaataaaatccatgaaatcatgggtctgagatgctagttatattttttttctttttttttttttttttttgagaccgggtctcactctgtcattcggctagagtgcagtgktgtgatctcggcttactgcaaccttggcctctcagactcaagcaatcctcccacctcagcctcccaagtagcttggaccatatgtataaaaatgtatatattttacatatatatattttttgagacagagtctcactctgtcgcccaggctggagtgcagtggcacaatctcggctcactgcaagctctgcctcctgggttcaagtgattctcctgtctcagtctcccaagtagctgggatcataggcacctaccaccacgccccactattttttgtatttttagtagagacggagtttcaccatgttggccaggctggtcttgaactcctgacctcaggtgatccacatgcttcggcctcccgaagtgctgggattacagtcatgagccaccatacccggccaatcaatagtccatatatatatatatatatatatttttttttttttttttttagatggagtctccctctgttgcccaggctggagtgcggtggcgcaatctcagctcactgcaagctccgcctcccgggttcacgccattctcctttctcagcctcccgagtagctgggactaccggcgcccaccaccacccccggctaattttttgtatttttagtagagacggggttgcaccatgttagccaggatggtctcgatctcctgaccttgtgatctgcccatctcagcctcccaaagtgctgggattacaggygtgagccaccgtgcccggccaatagttatattttttaatagaggtacatcactatttaaatttttggaagcccatttgcacatctctaaaaccactgcaaaatgggtccatattggaataggtccaatatgggtccaattggaataagccatactggaatagggtgggcccctaatcccatacgactggtgaacttaaaaaaagatggcctcacccaaggagctgctgcccacacggggctgctggacaaggtgcagagggatgtggcagggaaaggggaccagaagacaccagtgatctgctaaataaatgaaatggtgacgtcgcttccccagtggccctgcagagtgtggggcggcagtggctggcctttagggggcagcagggtgcaggggaaggagcaggcctttgaagtcacgagatgctgggttaaagtcctagttctgctgttcactagctgtgggccttggcaagcaacttcacttttctgagcttcaatttctgcttctgaaaaatggtgatgaccctttggtcatayggcaaggattgtggcaactgaggctaagacctggagcagggcagctgctctcaagaaacagttgctactgttaccattccacctatctggatgccacaaagtatcctgggaagaagtgggctttggagagagaaaaaatggggtttgatacctgatttcaccatttgtaacctgtgtggcaagttatttagtgtcagttttctcaactgtaaaagggaataataataccaaatttgcacagtggttttgaggactaaatgacataagttcttgggctggtcaaactcaattcccatgccatgttcttctcagtgttgacctggtgactgttcagaggacatcagggttgtggcctttcaatcactacaaggaactatgggaactcctgggtaaggagcccctcctcagagaatcacctcaacgaccagactggaaactgaattggaggttttcaggctggatagaggccaggggcttcaaggactacatgttcggctaggaggggggcctctagggagcaagtgcagggctgtgctcacagcaggagcttaatgaaggagctgggtgaatgaatgaagtcaggaacctgccagaaagggtggggagaggaacctatgcgctcaggggcagacaaggtggccaaccctcaccaaaccccccgccctgacacatgcacacacctcagctactttagctggggagatcttcccttcataagggcagccaagagcacaggagacgtacctgtgggaagacaggggaggaatgaggtcagtgtcctgagctttttggctagcagaactgaggcagggctgtttaacacacatttctgatcagtgtgcaatcaacacctgcagctgggcggagtaagggcagggatggtacaattcagtgccaggaggaggcagtagagagcaatggcagggaactgggggacaatggacctacaattgaggaagcagaagttgcacaggcctcaggagaggcagccaaggatttacaataagcggaggaggagctagagagggcaaggagagtaagcagctgggttgtaaggtggggagatggagcaaaactacgtgccagaggagctggggccagtactccaaaaggagaccaaagactgggtaaaaccaaactcagaacaagagctgagttggatatgagtcagtaacaggctgggctggcctgaggaccaagggatgagctgccccagtgagatgctagaggattcattcattcatttattcacctgatgtttactgagttgcctgctatgtgccaggcactggcacagagcagtgggcaagactgataaggttcctgccctctcagagcttatctcaagttagggagatggccaataaaaaagcaaccaagtaagtaatggagaaaatctcagaagtgatgtgccacagaggaaagatgggaaatgataggaacaagtggaggaggccaactagtgagggtccaggaaagatccctctgaggacaggatgctggagccgagaggagccgggggtggtctgtgagaagagcattccaggcagagggaagacctgggcaaagccctgagacagaagagccaggcatgctccagacagaacaaaggacagctgaggcagacagagcaaggggaaaggaagtatgagatgaggaggtcagcaaggtgggcacaggtctgatcatgggtcttagggctatggtaaggagggtggatttgggatgtaggtgacttctattcccacctgcccttttgggagctgtctttaaaaccctttagagtcaagcaaattctgcatattaagaggcataataaatgttcaacagataaataatttcagactcaaagatctcagtgtacttttccattttgatgctcccacttattctccaaccactgctgagcaagaaaaaggtaagagagatgcttagaaagacacagatctgggagttgggccaatgttactggagcacctgcttccccattcatccacctgcccgtcagtgactgagtgcccactgtggctaggccccaagctgggagagtggagcaccccagggactgggagagatgtgggctttgccctcatggagtgcacggtctagtggggtggggcagggagggaatttaacaagcagctaagtgctacatttagaggatgtcccgacaccatggggtcccagagaagggcactaactccagctgaaggactggagcagcttctcagaggaactgactcccacaagaagacctgaaggatgagcaggagttatccccgagaagcatgatgtggaggaagtgttctttattttttggagacagagtcttactctttcacccatgctggtgtgcagtggcatgattttggctcacttcagcttggacctcccaggctcaggtgatcttcccaccttagcctcctgagtagctgggactacaggcacatgcaaccacacctggctttttttttgtagagctggggtttcaccatgttgcccaggcccaagccagtcacaaactcctgggctgaagcaacctgcccaccttggcctcccaaggaaggttgttctgagtctagagagagcacgtgcaaaggcccagaggcaagagtggaggcatgtgacaaacagaaagaagttccagttgggctggagtgtaccatgaagaggaagcaggggccagaagggaacttgaacggtacggctacagaaaagagccgggaccaaatcatgcarggtttgtaaacctcattaaaaagtctgcacttgattagtcactgaaagctttttaaccaggagggatgtgatcagatgtgcacttttgtggggtttttttggtttttgtttttgagacagagtctcactctgtcacctaggctggagtgcastggcgtgatcttggctcactgcaacctctgcctcctgggttcaagtgattctcccgcctcagcctcctgagtagctgggattacaggtgcatgccactacgcccggctaatttttgtatttttagtagagatggggtttccccatgttggccaggctggtttcaaactccttacctcaggtgatctgcccgcctcggcctcccaaagtgctgggattacaggcatgagccaccatgttcagcccagatgtgcacttttcaacgatcattctggctgcaatgtttttttttttttttttttttttttgagatggagttttgctctgtcacccaggccggagtacagtggtgtgatctcggctcaccacaacctccgcctcccagattcaagtgattctcctgcctcagcctcccaagtagmtggaattacagctaatttttgtatttttagtaaagacggggtttctatccactaccacgcccagctaatttttgtatttttagtagagatggggtttcaccatgtcggccaggctggtcttgaactcttgacctcaggtgatccacctgccttgtcctcccaaagtgctgggattacaggtgtgagccaccatgcccggcctctggctgcaatttgcacagcagtgtgaccttacagtagagtattcgcccttcctgggcctcggttttgtaatttataaagtgaggataacctactccctgctgggctattgtgaggtttcaattattatagataatacacacacaatgcctggaaccactgatattagagatgtgatgttggaaacatagaagcctaggtaattctccagggatgtgtgaagagctagtgataaagccaggactcaactgacctccacaaacccgttagtgtcctgtcctgctagattcctttagcatgatagcagtggtgctatcatggctcactgcagcctcaaactcctggtctcaagccatcctctgcctcagtctcccaagttgctaggactacaggcgcatgctatcatggctagctggtaaactgacccaaaattcaggtttgagagaaagtacttcctaggatttcttctgaccacacttatttgggaaaagatgtctaggtgtggagctcaggctgcccccacccaggataagaagtttgtggcaggaggaccacttgagtcagagtctagccccattccagaacggtacagaggaaaggataccaatgtgctctgactcacccccgcacagaaatattggctgactgcgctgccttcaggattgcgtcaaacctctgaaaactctcctctatggaacaattgatgttcttcttggtraagagctctgaggcagctccaaagatgactacttccttggctccagcagcaacctgccaacatccaggtgaactcctttcagcacttttctctttttttgtttgagatggagtcttgctttgttgcccaggctggagtgcagtggcatgatctcggctcactgcaacctccacctcctgggttcaagcgattctcctgcctcagcctcctgagtagctgggattacaggagcccaycaccacgcccggctaatttttgtatttttagtagagacagcgtttcaccatgttggtcaggctggtttcgaactcctgaccttgtgatccacccacctcagcctcccaaagtgctgagattacaggtgtcagccatcatgcccggccagcacttttctctttaaagaacactgacacagagtagcaaaaaatttctcttaaggtaaattttatgttatgtgaatgttatgggttgaattgtgtcctcctaaaaatatatgttgaaggattaaaacccagcacctcagaatgtgaccttatttggaaacagcgtcattgcagatatcattagttaagatgaagccatactggaatagggtgggcccctaatcccatacgactggtgaccttaaaaaaagatggccagccgggcgcagtggctcacgcttgtaatcwcagcactttgggaggccgaggcgggcagatcatgaggtcaggagatcgagaccatcctggctaacacagtgaaaccccatctctactaaaaatacaaaaaattagccggtcgtggtggcacacgcctgtagtcccagctactcrggaggctgaggyrggagaatcacttgaaccygggaggtggagsttgcagtgagccragatcatgccactgyactccagcctgggygacagagcaagactctgtctaaaaaaaacaaaaacaaaagatggccaagtgaagacacagagacacagaaaaggtggccctgggaaaacggaggcaaagactggagagatgcatctacaagccaggcaatgccaaggactgctggccaccaccagaccccagcagagaggcataggacagattctcccagaggcctcagaaggaaccaatcctgctgacaccttgatttgggacttctggcctccagactgtgagagaataaatttctgttgtttttaagccacccaatttgtagtgctttctttttttttttcttttttctttttttgagacaaagtcttgctctgtcacccaggctggaatgcagtggcatgatcttggctcactgcaacctccgccttccgggttcaagtgattctcctgcctcagcctcctgagtagctrggattacaggtacctgccaccaagcctggctaattttttgtatttttagtagagacggggtttcatcgtgttagccaggatggtctcgatctcctgacctcatgatccgcccgccctggtctcccaaagtgctaggattacaggcgtgagccaccgcgcccggcctgtagtgctttcttacagtagcactaggaaacaaacacagtaatttctcttaattaaaaaaaaaaaaactttgattttccccaaggaaaccaccaccactgccatcaccaccctggaagtcactcttgagaaaaagcttttttttttttcttgctgtgtcacccaggctggaagagtgcagcggtattatcatggctcactgcagcctcgaactcctagtctcaagccatcctgtgcctcagtctcccgagtagctaggactacaggtgcatgccatcacagccagctaattgatttttttttttttttttgtagagacaaggtctccttatgttgctcaggctggtctcaagcttctggcctcaagctgttctccggcctcagcctcccaaagtgctgggattataggtgtgagccactgtgcccagccaaaaaaaggtttttgcctaaatacagaaccaacgcctccaaagatgttcttgtctaaaattgtaagaaagttggcagatgccagcaactactgttgaaactcttgtggagagtttggttacatttctctaaagaagtggataatcaaaagagctaacatttattaagcagttaccttttatctggctcttgctaagcaatgtacatgcatcctatcttctgaaatgctcacaacttcaggtactatcatttagccctattttataggcttgtcaacttgtcaagatcacagagcagtgagtggcagggccaggtttgccccagggtctggctgacagacaagctattcagatggacatcccaggacaggggactgaggcgccaagacaaggcagggaccaatgccatcaatctcatttcaggagcccccaccaacaagctatcctcttaccgctgcctcgaagcctttcaaatttggggtcaggactgggtagttgatgccaggaaacttctgaatgcccttcaagacttcagtgtggtcacccatctaggaaccaagggagacattgccaagtcatcaccaagagcagacagagagttcagttagagaaaaccttttcatcacaaaacctctgttctccagaactcttagcgagtaattccttctgcagagctgagtctctccaatacttttactgtttgtttgactgctgatggctcagaagggcccttggtttggctgagatcccaatttctccatatggcccatactgccagctttacatatgcagaaacagcaggaatactactaccagccatttattgagaatgtactctgggccaggcactgagctcagctctgtgttaagcactcctttgtaacaggatgtttcttcttcacttaactatctttgtgaagcaggagttgtcaktcttcctcttttacaaacaaagaaaccacagacaggcatagagggttttagactttagggctagaagaggtcatctctaacactgaggaggggaaggccttagcaatgtcactgagcaagtcagagcagagccaagactgaacccaaggccctgaatcctgggtcatgttcttttgctgcaacacagtgctatgaatcacctgagacctctcaaagccaggggcttggaaacctatgttctcaacttctacttgcttcaaaggcaaatgcaaaacttttcatccctrgagaaaggcctttcattgagggctagggctcacctggggaacccacttaggagacacaaagctggtggtttctataacagagagtcctgcttcagaaagcatgtctatcagcttgattttcactggagtagatacgatattctatagtggagagagaaacaccaaggcagcaaagttagtaacaaaacagcctcaaaatgcagtacctgttagttcaagtactatagataattttttgcagtggatgcagcttctcacctgaaaaggagttatttacatagaaacattattctgccatgcaggctttcccgtaagtaaatgtgtgttaatttataatcccatcataaacaaactgagagcaatgtgtgatggcctgaaagggcagagatgactaaccctctggggagtatgggatggggcccccaaagtatcacaccctcctcgcttctgtctcccaattggcataggacttcagcctcatgtgttcagcgtatagcttctttatcttcctccccaccatgtccagtagctcaacagattccatggattcctctttccaaatctaccatcattatcctgtatataacatggcatagtctcaagccactaattcatcttacacaggaatcctcctaaaatgcagcttccaaccttccattctcttgcatcaaaagctttctatggctccctaatatttacaggattacgcaaaaaattctaagaactccaggtccaggcggacacattggctcacgcctgtaatcccagcactttgggaggctgagacaggcagatcatttaagcttaggagtttgagaccagcctgggcaacatggcgaaaccccctctctacaaaaaatacaaaaattagccaggcgtggtggcacgtgtctgtgatccagctactcaggaggctgaggtggatcactggagcctgggaagtcgaggctgcagtgagcaatgattgtgccactgcactgagtgacacagagcaagaccctgtctcaaacaaaaagaacacacaaaaatactccaggtccttctcgctaggtcctccccttgcctgccttctccagtttctctcccactgctctaacttaatctttccacaaaawttttttttttttgagatggagtctcactgtattgcccagagtggagtgcagtggcacaatctcagctcactgcgacctccgccttccgggttcaagcgattctcctgcctcagcctccagagtagatgggattwcacaagcatgccaccaccccagctcatttattttagtagagatggggtttcaccatgttggccaggctggtctcaaactcctgacctcaggtgatctgcctgcctcagcctcccaaagtgccagtattacaggcatgagccatcatgcccagcctgtcaaataatttttgaaagccctccatgttgcaggcattgtgctaggtgccggggatatagcagtaagcagaagcagaacagacaggattytgcccttcrggaacttacacactattgtttccaacaagcactcactattaaagctaggatggacgtgctaaaaaaaaaaaaaaaaaaaaaaaaaaagagaaaaagaaaaaagcttttcttattgaaaaaataatcaatatatgattctttcagaaaaacatgccaaaaacaaaagaaaaccacccttagaatctcccagtgataacgctattaacaccctggtgtgtaactttctagatctgtgcagcccaatatgtcactagtcacatgtggttatttaaatttaataaaaattgtataaaaataaaaatacaattccttggccacactagtcacatctcaagttctcaagggccacatgggtatagtggccaccacatggaaaagctcaggtccagaatatttccatcttcacagaaagtgctggtctaggtcctagtctagataaatgctcccatacatatataaacttttttcttacataaaagtgttaagattaaaaaatacatggccaggcgcattggctcatgcctgtaatcccagcactttgggaggctgaggcaggtggatcacctgaggtcgggagttcaagaccagcccggccaacctggtgaaaccccatctctactaaaaatacaaaaattagctgggcatggtggcaggggcctgtaatcctagctattcgggaggctgaggcaggagaatcacttgaacccgggaggaggaggttgaggtgagccgagattgcgccattgcactccagcctgggtgacagagtgagatgccatctcccaaaaacacacacacacacacgcgcgcgtgcgtacgcgcacatgcactatttgtttttgtttggagacagaatcgtgctctgcctcagcctcctgaagtgctgggattacaggcatgagccaccaccatgcccagtcacatgtactattttataaactgcttgagtcactttatatatacctatgttattaatggcttcataatatttcattttataaaaagtccatagtgtatctgacccaactttcctcatactaaatatttaagttgtttccaactgttctgtgcttaccaaacaggtttgtaaggaacacccccaaggctaaatctctacatttggccttcgtgacttgctttggataaatccccttacatggaattgctgggtctaccccaccccactgggctgtggacctggggacaccaaacctgttgcaccaccattcagtttatatatatacatatattttttaataagatagagtcttgctatattgcccagactggtctcaaactcctgggctcaagccatcctcccacctcagcctcccaagtaattagggatgacaggcatgagccacccatccagcttgccccaccattttagatcatttaactgtcacaggtgtctgtccctgtttggcctcctctactctcccctaacttgtgcagaggaatcacatcttgcatagctctgtcaactgccattgcacctatcacacgtaatactcaaagcagatgcttgaaaaaactgtttttttggctcatttccaactttaccttttcattttgtagtccatctcggggaccaacttccacaattttcacccgctttggtaaagtgcccatagatgaggtgctgacctttggtttaaaagaggaaacaaaaagtatgaggaagagattgccacaattcccagggagaccaatatgaaagaatggatctatcttcactaataatgagacaagaagaaatatttctcaccatttaattcacatttggtctattttagaattaagaacaaaaagaatatttcacttagtaacaggaacaagcaagagattcatccttccagtaccggttctcccctgaagtccagactccttttccactgcctacctgacagctctattcgcatctcttcatatagcagtcccgaaacagaactctaatttctcctaaagcccatctgactccatcctttccatctctgtcaaaggcatcgcatgtaccctactgcataagccagaacttcattgagccatttcacctattcaccatggcctataggactctgtatgctgctgtatgtatgttagaagtagtttaaaaaggccaggtattgcggggggcagtggctcatgcctgtaatcccagtactttgggaggccgaagcgggcgatcacttgaggtcgggagtttgagaccagcctgaccaacatggtgaaaccccatctctactaaaaatacacaaaaaatagccgggtgtggtggtgcacgcctgtaactccagctactcaagaggctgaggcaggagaattgcttgaaccagggaggtggaagttgcaatgagccaagatcgtgccactgtactccaccttgggcgacasaggaagactccatttccaaaaaaaataaaaaaaggccaggcacggtggctcatgcctgtaatcccagcactttgggaggccaaggcaggcagatcacttgaggccagaggttcgagatcagcctggccaacatgatgaagaaaccccgtctctactaaaaatagaaaaattagccaggtgtggtggaatggacatgtagtcccagctactcaagaggctgaggtgggagaatcgcttgagcccagaaggttgagcctgcagtgagctatgactgtgccactacactccagcctgggcaacagagcgagaccctgtctcaaaaaaaaaaattaaatgactctatatgtcacttgatgctttccaattaagaaaagaaaagactgtatgagttgcctcctctgacctcctggawtcatcactcgcccctacygtccactcccaacctccacccaacaggttgctaagctccctgccttctcttccctctgccccagggttcctcatctggctttttttaaaaaaactggctgttctyacatctctctctcatctttcagttgcagagaggcttcctctgaccaccctttgcaaagctgccattcctcccacccccattattttcgctattgcagagctataattatttccttcaaagcacgataaagaatgcctactcaatgtctcttccagtagaacataagctctttgagggaccttgtctgtctcaactccacttcatccctagtgtttggcaccgtgtttggtacaaagtagccactctttaaagttattaaaataacacataaaccatgaaggacacagctgtcccagaagagagcaattactgagtgtggggaggagtagtcagtcctggacttttcggggtatgggcgagatgcaggagggctctcttctgttacagtcataggctgggtgatgacaagcatgggtctaaggggaggtgacacccccagtagctgaagacagtttttacaaaatgccctgagtctcctctatataaagtcagctcaaaatcttagtcttccctatcaagtaacacaatactttttttttcctctttcctctacctgtcttgatactgtaacttttcaaatcaactttgttttacagatttaatctggataaatatactacaacgaggcaaagcggaaggcacactgtgtgatccgctaaggatctcaaccycctgaagtcccccaggaattccctgctaggaagcagctggaacatgtacaactcacctgactggccttgttttagccaacaagctttcttagagactaaggcgatgagccattgaatttcatgacgtcaacaggctaagttggaaggtccctgcaacttgaatctccctccaacagggatgttcagcctctgctagtatatcaccctaaaactatctcactggaacataagtttcatgagacagggactttgttttattcaatgctgtatttctaaggmcctgggacataataggggctcgataaataacagttgagtgttgctgaaataatctaaaacctgcttcaggccaagcgtggtggctcacgcctgtaatcccagcactttgggaggccgaggtgggcagatcacctgaggtcagaagttcgagaccagcctagccaacatggtgaagccctatctctactaaaaacacataaattagctaggcatggcagcaggtgcctgcaatcccagctactcgggaggctgaggcaggagaattgcttgaacccaggaggaggaggttgcagtgagctgagatcgtgccattgtactccagcctggggtacaagagcgagacttcttcatctcaaaaaaaaaaaaaaaaaaaaaagcttctaaaacctgcttccaagctgcttttattagaacattataaactcaattccacttccttccttccccgtaacagctcttcacataataattcagtttttaaacacttaatatttgccaggcacatacaagagccatttacatatttatttatwtatttatttatttgagatacagtctcattctgtctccaggctggagagcagtggcgcgatcttggctcactgcaaccttcacctcccaggttcaagtgattctcctgcctcagcctcccgagtagctgggactacaggtgygcaccaccacacctggctaattttttgtattttagtagagacaggatttcaccaggttggccaggctggtcccgaactcccgacctcaagtgatccacccacctcagcctcccaaagtgctaggattataggcatgagccaccacgcctggtgagccatttacatattaacccatactgtcctctcaacaatcttatcaggtaggaactatcatcatccccattttactgtaagaaatctaaggccccacttgggaggctgaggcagaagaatcgcttgaacctgggaggcagaggttgcagtgagctgagattgagccactgcactccagtctgggtgacagatgacagagcaagacaccgtctcaggaaaaaaaaaaagaaagaaaagaaaagaaatctgagacccaaagagattaagtaatcttcccgaggtgacatggggagttactnnnngaggcaatatctaaacctggcagtgtggctctagagcacaagctcctaacctctgggccactgttgcctctttaccaccgttcgttcggtccacagtcttctcctggttaaacatcccgttcctcctctgtaaagctctgctcagagagggtccccctaaccacacaagtactgtgccacagtgtcctgaggtatggtgtacctgcatcaacaccaacagcgaatactgactaaacccagtgttaaactacaggccagggactattattatcccaactccgtaggtgaagaaactaagcctcagaaaggttacccaaaaatcacaattagaaagtgacagagcttggacttgaacccatatctaggcctaatactaatactggttcctatgcttggaaccccatggagggccatctcattacaccaaatatttcttaaaagcttattaatatctactattgcgtttaactttccaagttggaattgccatcttcattttacacatgagcaggtggtgcaggtgaatggccaagtaaagatattaacgtggctttctgagagggacccagtgccaggagtgtatttttccctctatacagttataactccttctcaactccctaaggtaaaaataccaccaccgactgatcacttattaggagccagaacactgccagatgtgttacttacattttctctaatttccaaaacaaccccaagggaatgttgtccgttttacagacgaaagagctgaggtttagagaaagtaaataactatgtcattaagtctagaaagtggcagaactattgggacaccctagcttcagcttttattttttctgctccatacagctacgtctcccacactttttctgcgctgagaatgggagaggggaaaacatcaggatcgaacaggatcaaagtgcaattccaagggaatcacagcttggctccaatcaacgcaagtcccgctcggtaggctgggatagttccccaagcatctctaaaagcaacaacagttggaaatggagacgaaggaaatggaagcgtgttcttgattttcactaatgaagagttggagaggtctgaagttcaattagagggagaaaggggccagggtcatcggaaagggccctgggcggggaatcagggcacctaggatggcgtcccaggtctccatgacccagacaagtcactccacctctccggacctcagttttcccatccccttcaaaggatttgaggggaaaagggagggtccaggactccaacgccctcccgactctggcctgagagctgtccggcctcgcctctaagagagcagtcaccacgggccaagcccccaaccctgacagtcagagtgcctgcagggccgccgcctcggcggctcggggcacttacagcccggagggacgccaagcccaccagtcgccgcggaagcgccttcctcattgctgccatcttggcccagaatcccccgcggcagtccagctgggccccgcgtgaccgatggctcgtctggtgggcgcggccccgcccccgcccctccgcmgtgacttccgaagctggctccacccccagcctctctccgttttgattccgagcgcctcttccatgccaggccaagtgagacgctaggaatataaagatgaacagaatcagcctggacaccatgtaatcctagcactttgggagaccgaggcgggtagatcacctgaggtcaggaattcgagaccagcctggctaacatggcgaaacccccgtctctmcaaaaaatccaaaaaaaaaaaaaaaaaaaaaaaaaaaaaaaaaaagccgggcgtggtggtgggcgcctgtaatcccagctacttgggaagctgaggcaggagaattgtttgaacccgggaggcgaggttgcagcgagcggagatcgtgccactgcactccagcctgggcgacacagtgagagcctgtccaaaacaaaaaacccaaaaccaaacaaacaaaaacatgaaaagaaattaaccaaattctgtggcttcttgtgtttagagtgtgggaggtgtgaggagacacatattaatagttacacaaacagttgtgtcatttctaacttgcactataagaagcaacgatttgctactcactgttccgagttcttagcacggattaactcacgcatcacgatcttcaggattcaaacacaggcaggcagctccagagagggggcatccttagatttcataccttaaaaaaatgattaagatttatctaggtgtactttctgaagggctnaaaaaaaaaaaaatctatccaggtgaagaggatacaagaaaaactttccagacggtgtagcattcgcaatggccctgaggcaaagaaaatgctgagaacactgtttttctctcttttgttttgttgktttgttttgtttgtttgagatggagtctcactctgtcacccaggttggagtgcagtggcgcgatttcggctcactgcaacctccgcctcccgagttcaagagagtctcgtgcctcagtctcccgagtagctgggattacaggtgtgcaccaccacgcctggctaattttagtgtttttagtagaaacgaggtttcaccgtgttggccaggctggtctcaaattcctgacctcaggtgatccgcccgccttggcctcccaaaatgctgggattacaggcgagagccaccgcccccggccagagcactgttttcaaactgtatgttgtaccccactaattggtcacagtatcaatttagtgggtacaaactttatttaaaacaargaactagaattttatctatctatcatctatctatctatctatctatctatctatctatctatccatctatatttatttattaagacgaagtctcactgtgttgcccaggctggagtgcggtggcgtgatctcggctcactgcaacctctgaccccggggttcaagcgattctcctgcctcagcctccggagtagctgggattacaagtgcccatcaccgtgcccagataatgtttgtattttta

(The sequence listing continues in the following parts.)
